(19) United States
(12) Patent Application Publication
(10) Pub. No.: US 2023/0098002 A1
(43) Pub. Date: Mar. 30, 2023

(54) MEANS AND METHODS FOR PREPARING ENGINEERED TARGET PROTEINS BY GENETIC CODE EXPANSION IN A TARGET PROTEIN-SELECTIVE MANNER

(71) Applicant: EUROPEAN MOLECULAR BIOLOGY LABORATORY, Heidelberg (DE)

(72) Inventors: Edward Anton LEMKE, Mainz (DE); Christopher Dieter REINKEMEIER, Heidelberg (DE); Gemma ESTRADA GIRONA, London (GB)

(21) Appl. No.: 17/426,338

(22) PCT Filed: Feb. 14, 2020
(86) PCT No.: PCT/EP2020/053883

§ 371 Date: Jul. 28, 2021

(30) Foreign Application Priority Data
Feb. 14, 2019 (EP) 19157257.7

(51) Int. Cl. C12P 21/02; C12N 9/00

(52) U.S. Cl. CPC C12P 21/02; C12N 9/93; C07K 2319/05; C07K 2319/735

(57) ABSTRACT

The present invention is concerned with orthogonal translation systems which allow for the site-specific introduction of non-canonical amino acid residues into a target protein (POI) in a POI-mRNA-selective manner. Specifically, the present invention relates to assembler fusion proteins which bring an RNA-targeting polypeptide (RNA-TP) segment and an orthogonal aminoacyl tRNA synthetase (O-RS) segment into spatial proximity of one another, either by direct linkage in RNA-TP/O-RS fusion proteins, or though the action of “assemblers” fused to each of these segments in assembler fusion proteins (AFPs). The invention also relates to AFP combinations and nucleic acid molecules comprising a POI-encoding sequence together with a targeting nucleotide sequence that is able to interact with an RNA-TP. The invention further relates to nucleic acid molecules, expression cassettes and expression vectors encoding said RNA-TP/O-RS fusion proteins or AFPs, cells comprising same, as well as methods and kits for translationally preparing POIs.

### CROSS-REFERENCE TO RELATED APPLICATION(S)

[0001] This application claims the benefit of priority of EP No. 19157257.7, filed Feb. 14, 2019.

### SEQUENCE LISTING

[0002] The instant application contains a Sequence Listing which has been submitted electronically in ASCII format and is hereby incorporated by reference in its entirety. Said ASCII copy, created on Feb. 7, 2022, is named 05710_049US1_SL.txt and is 5,207,732 bytes in size.

### FIELD OF THE INVENTION

[0003] The present invention is concerned with orthogonal translation systems which allow for the site-specific introduction of non-canonical amino acid (ncAA) residues into a polypeptide of interest (POI) in a POI-mRNA-selective manner. Specifically, the present invention relates to fusion proteins which bring an RNA-targeting polypeptide (RNA-TP) segment and an orthogonal aminoacyl tRNA synthetase (O-RS) segment into spatial proximity of one another. This is achieved by combining an RNA-TP segment and an O-RS segment in one and the same fusion protein (RNA-TP/O-RS fusion protein), or by the action of one or more polypeptide segments which act as “assemblers” (APs) and facilitate a local enrichment of assembler fusion proteins (AFPs) comprising the one or more APs together with an RNA-TP segment or an O-RS segment, thus bringing said RNA-TP and O-RS segments into close proximity of one another. The invention also relates to AFP combinations and nucleic acid molecules comprising a POI-encoding sequence together with a targeting nucleotide sequence (TN) that is able to interact with an RNA-TP. The invention further relates to nucleic acid molecules, expression cassettes and expression vectors encoding said RNA-TP/O-RS fusion proteins or AFPs, cells comprising same, as well as methods and kits for translationally preparing POIs.

### BACKGROUND OF THE INVENTION

[0004] The ability to engineer orthogonal (i.e. non-crossreactive) translation systems site-specifically into living cells enables the introduction of new functionality into proteins. However, this is a herculean task, as translation is a complex multistep process in which at least 20 different aminoacylated tRNAs, their cognate aminoacyl tRNA synthetases (RS), ribosomes and diverse other factors work in concert to synthesize a polypeptide chain from the RNA transcript. An ideal orthogonal system would show no cross-reactivity with factors of the host machinery, minimizing its impact on the housekeeping translational activity and normal physiology of the cell.

[0005] Towards this goal, genetic code expansion (GCE) is a method that enables reprogramming of a specific codon. With GCE, an orthogonal (suppressor) RS (O-RS) can aminoacylate its cognate suppressor tRNA with non-canonical amino acids (ncAAs). These ncAAs are typically custom designed and harbor chemical functionalities that can, for example, enable protein function to be photocontrolled, encode posttranslational modifications or allow the introduction of fluorescent labels for microscopy studies using click chemistry. To introduce ncAAs site-specifically into a polypeptide of interest (POI), the anticodon loop of the tRNA is chosen to decode and thus suppress one of the stop codons (see, e.g., Liu et al., Annu Rev Biochem 2010, 79:413-444; Lemke, ChemBioChem 2014, 15:1691-1694; Chin, Nature 2017, 550; 53-60). To minimize the impact on the host cell machinery, the Amber stop codon (corresponding tRNA_{CUA}) is often utilized, owing to its particularly low abundance in E. coli, to terminate endogenous proteins (<10%). Nevertheless, in principle any Amber codon in the genome can be suppressed, potentially leading to unwanted background suppression of non-targeted host proteins. If ncAA-modified proteins are recombinantly produced for in vitro applications, this background incorporation might be tolerable as long as the yields of purified full-length protein are acceptable. However, the challenge is different if the host is considered more than just a bioreactor vessel that can be sacrificed for its protein. In order to study the function of a host-cell POI in situ, the physiological condition of that host cell is an important factor. In that context, minimization of background incorporation of the ncAA is particularly required to ensure well-controlled experiments.

[0006] At least three elegant approaches have been developed to enable orthogonal translation in E. coli, that is, to decode a specific codon only for the RNA of the POI and not the entire genome. i) Orthogonal ribosomes recognizing a unique Shine-Dalgarno sequence have been developed to decode quadruplet codons, which are then used instead of stop codons to site-specifically encode an ncAA into a POI. (See, e.g., Heumann et al., Nature 2010, 464:441:444; Orelle et al., Nature 2015, 524:119-124; Fried et al., Angew Chem 2015, 54:12791-12794.) ii) Recently, genome engineering has advanced to the stage that E. coli strains can be depleted of selected native codons, providing a genetically clean (e.g. Amber codon free) host background for selective decoding of specific codons only in the POI. (See, e.g., Isaacs et al., Science 2011, 333:348-353; Lajoie et al., Science 2013, 342:357-360; Ostrov et al., Science 2016, 353:819-822; Wang et al., Nature 2016, 539:59-64.) iii) Unique non-canonical codons have been designed using an artificial base pair encoded only in the coding sequence of the POI. This lowers the risk of nonspecific decoding in other parts of the genome (see Zhang et al., Nature 2017, 551:644-647). However, due to genome complexity, it is not straightforward to transfer these orthogonal translation approaches to eukaryotes (see, e.g., Thompson et al., ACS Chem Biol 2018, 13:313-325), in which additionally the Amber codon is highly abundant (20% in mammalian cells).

[0007] There is therefore a high demand for strategies for POI-selective orthogonal translation which are versatile and work not only for well-characterized prokaryotes such as E. coli, which are relatively easy to handle and manipulate, but are also applicable to eukaryotic cells. It was therefore an object of the present invention to address this challenge.

### SUMMARY OF THE INVENTION

[0008] The inventors found that orthogonal translation systems (OT systems) which are able to selectively translate the mRNA of a POI can be created by generating spatial proximity between the mRNA of the POI and the O-RSs which allow for translationally introducing the ncAA residues into the growing polypeptide chain of the POI. The inventors demonstrated for a variety of POIs, including membrane proteins, that their OT systems allow for site-specifically introducing ncAA residues into a POI in a mammalian cell with selectivity for the mRNA of the POI compared to other mRNAs in the cytoplasm that contain the same stop codon (that is used as selector codon for encoding the ncAA residue of the POI).

[0009] In the orthogonal translation systems of the invention, the spatial proximity is achieved by including a targeting sequence (TN) in the mRNA of the POI that can selectively interact with an RNA-targeting polypeptide (RNA-TP), and linking the O-RS with such RNA-TP. Said linkage can be in a fusion protein comprising both, the O-RS and the RNA-TP (RNA-TP/O-RS fusion protein).

[0010] In another approach, this can be achieved by the action of one or more polypeptide segments which act as “assemblers” (APs) in facilitating a local enrichment of at least two assembler fusion proteins (AFPs) at least one of which comprising the one or more APs and an RNA-TP segment and at least one other AFP comprising the one or more APs and an O-RS segment, thus bringing said RNA-TP and O-RS segments (RNA-TP and O-RS also designated “effector” or “EP”) into close proximity of one another. The local enrichment of the AFPs allows for the formation of assemblies (OT assemblies, also termed “OT organelles” herein) which can act as artificial orthogonally translating organelles.

[0011] The inventors demonstrated that different types of APs can be used. A first type includes APs which drive local enrichment at (previously existing) intracellular structures (such as, e.g., microtubules or the cytoplasmic side of membranes such as the cell membrane or the nuclear membrane, the ER, mitochondrial or Golgi organelles), termed intracellular targeting polypeptide (IC-TP) segments. A second type of APs generates high local AFP concentrations by self-association in the cytoplasm (in particular by phase separation) termed phase separation polypeptide (PSP) segments herein. Said AP types may also be combined with other polypeptide elements having the ability to form multimeric structures, like in particular, coiled coil heterodimers, as formed by synthetic SYNZIP polypeptide pairs. Similarly, said EP types may also be combined with other polypeptide elements having the ability to form multimeric structures, like in particular, coiled coil heterodimers, as formed by synthetic SYNZIP polypeptide pairs. Such multimer formation further improves local enrichment of AFPs.

[0012] The inventors further found that AFPs combining different AP types are particularly useful.

[0013] In still another approach, AFPs are provided encompassing in a single polypeptide, i.e. fused together, both types of EP segments, i.e. the RNA-TP and O-RS segment, one or both types of AP segments, i.e. the IC-TP and/or PSP segment, optionally supplemented by said polypeptide elements having the ability to form multimeric structures (SYNZIP polypeptide). This provides the advantage that all the elements required for generating an OT system of the invention are included in one single AFP.

[0014] Thus, in a first aspect, the present invention relates to an assembler fusion protein (AFP) comprising:
[0015] (a) at least one first polypeptide segment acting as assembler (AP) that is selected from:
   [0016] (a1) a polypeptide segment derived from an intracellular targeting polypeptide (IC-TP segment), wherein said intracellular targeting polypeptide targets, and thus becomes locally enriched at, an intracellular structural element within or directly adjacent to the cytoplasm; and
   [0017] (a2) a polypeptide segment derived from a phase separation polypeptide (PSP segment), wherein said phase separation polypeptide has the ability to undergo self-association in the cytoplasm of a cell so as to create sites of high local concentration in the cytoplasm, and
[0018] (b) at least one second polypeptide segment acting as an effector (EP) that is selected from:
   [0019] b1) an RNA-targeting polypeptide (RNA-TP) segment, and
   [0020] b2) an orthogonal aminoacyl tRNA synthetase (O-RS) segment;
[0021] wherein said polypeptide segments are functionally linked in said AFP.

[0022] In a second aspect, the present invention relates to an assembler fusion protein (AFP) combination comprising at least two AFPs of the present invention as described herein. Preferably, the AFP combination comprises at least one AFP comprising a RNA-TP segment and at least one AFP comprising an O-RS segment. Including into at least one AFP of said combination a first SYNZIP element and including in at least another AFP of said combination a second SYNZIP element, wherein said first and said second SYNZIP act together by forming a heterodimer structure, represents another advantageous form of said second aspect.

[0023] In a third aspect, the present invention relates to a fusion protein (RNA-TP/O-RS fusion protein) comprising:
[0024] (i) at least one RNA-targeting polypeptide (RNA-TP) segment; and
[0025] (ii) at least one orthogonal aminoacyl tRNA synthetase (O-RS) segment,

[0026] wherein said polypeptide segments are functionally linked in said RNA-TP/O-RS fusion protein.

[0027] In a further aspect, the present invention provides a nucleic acid molecule, or a combination of two or more nucleic acid molecules, comprising:
[0028] (i) a nucleotide sequence that encodes at least one RNA-TP/O-RS fusion protein of the present invention as described herein, or
[0029] (ii) a nucleic acid sequence complementary to (i), or
[0030] (iii) both of (i) and (ii).

[0031] In a further aspect, the present invention provides a nucleic acid molecule, or a combination of two or more nucleic acid molecules, comprising:
[0032] (i) a nucleotide sequence that encodes at least one AFP of the present invention as described herein, or
[0033] (ii) a nucleic acid sequence complementary to (i), or
[0034] (iii) both of (i) and (ii).

[0035] In a further aspect, the present invention provides a nucleic acid molecule, or a combination of two or more nucleic acid molecules, comprising:
[0036] (i) a nucleotide sequence that encodes at least one AFP combination of the present invention as described herein, or
[0037] (ii) a nucleic acid sequence complementary to (i), or
[0038] (iii) both of (i) and (ii).

[0039] In further aspects, the present invention provides an expression cassette comprising the nucleotide sequence of the nucleic acid molecule, or the combination of nucleic acid molecules, of the present invention as described herein.

[0040] In particular embodiments, the present invention provides an expression cassette comprising:
[0041] (i) a nucleotide sequence that encodes at least one RNA-TP/O-RS fusion protein of the present invention as described herein, or
[0042] (ii) a nucleic acid sequence complementary to (i), or
[0043] (iii) both of (i) and (ii).

[0044] In further particular embodiments, the present invention provides an expression cassette comprising:
[0045] (i) a nucleotide sequence that encodes at least one AFP of the present invention as described herein, or
[0046] (ii) a nucleic acid sequence complementary to (i), or
[0047] (iii) both of (i) and (ii).

[0048] In further particular embodiments, the present invention provides an expression cassette comprising:
[0049] (i) a nucleotide sequence that encodes at least one AFP combination of the present invention as described herein, or
[0050] (ii) a nucleic acid sequence complementary to (i), or
[0051] (iii) both of (i) and (ii).

[0052] In further aspects, the present invention provides an expression vector comprising at least one expression cassette of the present invention as described herein.

[0053] In further aspects, the present invention provides a cell comprising at least one nucleic acid molecule, or combination of nucleic acid molecules, of the present invention as described herein. In particular embodiments, the cell comprises at least one expression cassette or at least one expression vector of the present invention as described herein.

[0054] In a further aspect, the present invention relates to a method for preparing a polypeptide of interest (POI) comprising in its amino acid sequence one or more non-canonical amino acid (ncAA) residues. Said method comprises expressing the POI in a cell of the present invention in the presence of said one or more ncAAs, wherein the cell comprises:
[0055] (i) at least one AFP comprising a RNA-TP segment and at least one AFP comprising an O-RS segment as described herein;
[0056] (ii) a POI-encoding nucleotide sequence (CS^{POI}) wherein said one or more ncAA residues of the POI are encoded by selector codon(s),
[0057] (iii) a targeting nucleotide sequence (TN) that is functionally linked to the CS^{POI} and is able to interact with an RNA-TP segment of at least one of the AFPs in the cell;
[0058] (iv) one or more orthogonal tRNA^{ncAA} (O-tRNA^{ncAA}) molecules which carry the anticodon(s) complementary to the selector codon(s) of the CS^{POI}, and wherein said O-tRNA^{ncAA} molecules together with one or more O-RS segments of the AFPs in the cell form one or more orthogonal O-RS/O-tRNA^{ncAA} pairs which allow for the introduction of said one or more ncAA residues into the amino acid sequence of the POI;
[0059] and wherein the method optionally further comprises recovering the expressed POI.

[0060] Said at least one AFP comprising a RNA-TP segment and said at least one AFP comprising an O-RS segment recited in (i) can be one and the same type of AFP, i.e. an AFP comprising both a RNA-TP segment and an O-RS segment. Alternatively, said at least one AFP comprising a RNA-TP segment and said at least one AFP comprising an O-RS segment recited in (i) can be different AFPs.

[0061] In a further aspect, the present invention relates to a method for preparing a polypeptide of interest (POI) comprising in its amino acid sequence one or more non-canonical amino acid (ncAA) residues. Said method comprises expressing the POI in a cell of the present invention in the presence of said one or more ncAAs, wherein the cell comprises:
[0062] (i) RNA-TP/O-RS fusion proteins of the present invention as described herein;
[0063] (ii) a POI-encoding nucleotide sequence (CS^{POI}) wherein said one or more ncAA residues of the POI are encoded by selector codon(s),
[0064] (iii) a targeting nucleotide sequence (TN) that is functionally linked to the CS^{POI} and is able to interact with an RNA-TP segment of at least one of the RNA-TP/O-RS fusion proteins in the cell;
[0065] (iv) one or more orthogonal tRNA^{ncAA} (O-tRNA^{ncAA}) molecules which carry the anticodon(s) complementary to the selector codon(s) of the CS^{POI}, and wherein said O-tRNA^{ncAA} molecules together with one or more O-RS segments of the RNA-TP/O-RS fusion proteins in the cell form one or more orthogonal O-RS/O-tRNA^{ncAA} pairs which allow for the introduction of said one or more ncAA residues into the amino acid sequence of the POI;
[0066] and wherein the method optionally further comprises recovering the expressed POI.

[0067] In a further aspect, the present invention relates to a method for preparing a polypeptide of interest (POI) comprising in its amino acid sequence one or more non-canonical amino acid (ncAA) residues. Said method comprises the steps of:
[0068] (a) expressing in a cell one or more AFPs comprising at least one RNA-TP segment and one or more AFPs comprising at least one O-RS segment as described herein;
[0069] (b) expressing in said cell one or more orthogonal tRNA^{ncAA} (O-tRNA^{ncAA}) molecules, wherein
   [0070] said orthogonal tRNA^{ncAA} molecules and one or more of the O-RS segments of the AFPs in the cell form one or more orthogonal aminoacyl tRNA synthetase/tRNA^{ncAA} (O-RS/O-tRNA^{ncAA}) pairs,
   [0071] said O-RS/O-tRNA^{ncAA} pairs allow for introducing said one or more ncAA residues into the amino acid sequence of said POI,
[0072] wherein steps (a) and (b) can be concomitantly or sequentially in any order;
[0073] (c) then, expressing said POI in said cell in the presence of said one or more ncAAs, wherein
   [0074] the POI-encoding nucleotide sequence (CS^{POI}) comprises one or more selector codons encoding said one or more ncAA residues,
   [0075] said selector codons match the anticodons of said one or more O-tRNA^{ncAA} molecules;
   [0076] said CS^{POI} is functionally linked to a targeting nucleotide sequence (TN), thus forming a CS^{POI}/TN fusion sequence,
   [0077] said CS^{POI}/TN fusion sequence is able to interact, via its TN, with an RNA-TP segment of at least one of the AFPs in the cell;
[0078] and
[0079] (d) optionally recovering the expressed POI.

[0080] In a further aspect, the present invention relates to a method for preparing a polypeptide of interest (POI) comprising in its amino acid sequence one or more non-canonical amino acid (ncAA) residues. Said method comprises the steps of:
[0081] (a) expressing in a cell RNA-TP/O-RS fusion proteins of the present invention as described herein;
[0082] (b) expressing in said cell one or more orthogonal tRNA^{ncAA} (O-tRNA^{ncAA}) molecules, wherein
   [0083] said orthogonal tRNA^{ncAA} molecules and one or more of the O-RS segments of the RNA-TP/O-RS fusion proteins in the cell form one or more orthogonal aminoacyl tRNA synthetase/tRNA^{ncAA} (O-RS/O-tRNA^{ncAA}) pairs,
   [0084] said O-RS/O-tRNA^{ncAA} pairs allow for introducing said one or more ncAA residues into the amino acid sequence of said POI,
[0085] wherein steps (a) and (b) can be concomitantly or sequentially in any order;
[0086] (c) then, expressing said POI in said cell in the presence of said one or more ncAAs, wherein
   [0087] the POI-encoding nucleotide sequence (CS^{POI}) comprises one or more selector codons encoding said one or more ncAA residues,
   [0088] said selector codons match the anticodons of said one or more O-tRNA^{ncAA} molecules;
   [0089] said CS^{POI} is functionally linked to a targeting nucleotide sequence (TN), thus forming a CS^{POI}/TN fusion sequence,
   [0090] said CS^{POI}/TN fusion sequence is able to interact, via its TN, with an RNA-TP segment of at least one of the RNA-TP/O-RS fusion proteins in the cell;
[0091] and
[0092] (d) optionally recovering the expressed POI.

[0093] In a further aspect, the present invention relates to a nucleic acid molecule comprising:
[0094] (i) a nucleotide sequence (CS^{POI}) that encodes a polypeptide of interest (POI), said POI comprising one or more, identical or different, non-canonical amino acid (ncAA) residues which are encoded in the CS^{POI} by selector codons, and
[0095] (ii) a targeting nucleotide sequence (TN), wherein an RNA molecule comprising said TN is able to interact via said TN with an RNA-targeting polypeptide (RNA-TP).

[0096] In a further aspect, the present invention relates to a kit for preparing a polypeptide of interest (POI) having at least one non-canonical amino acid (ncAA) residue, the kit comprising:
[0097] at least one ncAA, or salt thereof, corresponding to the at least one ncAA residue of the POI, and
[0098] at least one expression vector of the present invention as described herein.

[0099] Said expression vector comprises at least one expression cassette comprising:
[0100] (i) a nucleotide sequence that encodes at least one RNA-TP/O-RS fusion protein of the present invention, at least one AFP of the present invention, or at least one AFP combination of the present invention, or
[0101] (ii) a nucleic acid sequence complementary to (i), or
[0102] (iii) both of (i) and (ii).

### BRIEF DESCRIPTION OF THE FIGURES

[0103] FIG. 1 shows a schematic representation of the spatial separation of the components which allow for orthogonal translation so as to decode a specific stop codon in a uniquely tagged mRNA. (A) Conventional expression of the synthetase PylRS leads to aminoacylation of its cognate stop codon suppressor tRNA^{Pyl} with a custom designed ncAA. This leads to site-specific ncAA incorporation whenever the respective stop codon occurs in mRNA of the POI. Given that many endogenous mRNAs terminate on the same stop codon, utilizing this approach in the cytoplasm potentially leads to misincorporation of the ncAA into unwanted proteins (left box). (B) To avoid this, the present invention allows that the mRNA encoding the POI and the orthogonal aminoacyl-tRNA synthetase (e.g., PylRS) can be brought into close proximity to one another through the use of an RNA-targeting polypeptide segment (e.g., MCP) and assemblers (APs). This allows for spatial enrichment of all components so as to create an OT assembly (“OT organelle”), including the mRNA encoding the POI, the orthogonal aminoacyl-tRNA synthetase, the tRNA, and ribosomes (right box). Here aminoacylated tRNA^{Pyl} is particularly available in direct proximity of the OT organelle, so that particularly here stop codon suppression (of the POI mRNA) can occur. This leads to a selective suppression of stop codons (and thus expression) of the POI mRNA over corresponding stop codons in mRNAs that are not targeted to the OT assembly. While in (A) GCE occurs stop codon-specific, in (B) it should occur stop codon-specific and mRNA-specific.

[0104] FIG. 2A shows a schematic representation of different assembler classes. B=bimolecular MCP::PylRS fusion, P1=fusions to FUS and EWSR1, P2=SPD5, K1=truncation of kinesin KIF13A (KIF13A_{1-411,ΔP390}), K2=truncation of kinesin KIF16B (KIF16B₁₋₄₀₀) and combinations thereof (K1::P1, K1::P2, K2::P1, K2::P2).

[0105] FIG. 2B shows a schematic representation of the dual-color reporter. mRNAs encoding the fluorescent proteins GFP and mCherry, containing stop codons at permissive sites, are expressed from one plasmid, each with its own CMV promoter, ensuring a constant ratio of mRNA throughout each experiment. The mRNA of the mCherry reporter is tagged with two MS2 RNA stem-loops (“ms2”, also referred to as MS2-tag herein), mRNA(mCherry)::ms2. In the presence of ncAA and tRNA^{Pyl}, in the case of cytoplasmic PylRS, both GFP^{39STOP} and mCherry^{185STOP} are produced, leading to a diagonal in fluorescence flow cytometry (FFC) analysis (left box). However, under the same conditions, orthogonal translation in OT organelles enables selective stop codon suppression of mRNA(mCherry)::ms2, resulting in an mCherry-positive and GFP-negative population (drawn schematically as a vertical population in the right box). In both schemes, non-transfected HEK293T cells are represented by a gray circle at the bottom.

[0106] FIG. 2C shows the selectivity and relative efficiency of various exemplary OT systems. For all experiments the indicated constructs were co-expressed with tRNA^{Pyl} (anticodon corresponding to the indicated codon) and the dual reporter (GFP^{39STOP}, mCherrys^{185STOP}::ms2). GCE was performed in presence of the indicated ncAAs, and cells were analyzed by FFC. The dark gray bars (normalized to cytoplasmic PylRS) represent the fold change in the ratios r of the mean fluorescence intensities of mCherry versus GFP (derived from FFC, see FIG. 2D, E) for all the systems tested. The light-gray bars represent the relative efficiency as defined by the mean fluorescence intensity of mCherry for each condition divided by cytoplasmic PylRS control (derived from FFC, see FIG. 2D, E). Shown are the mean values of at least three independent experiments; error bars represent the SEM. The box highlights the best performing OT organelle (OT^{K2::P1})

[0107] FIG. 2D shows the results of the FFC analysis of the dual-color reporter expressed with the four indicated systems in transfected HEK293T cells and tRNA^{Pyl} in the presence of the ncAA SCO, a lysine derivative with a cyclooctyne side chain. Highly selective and efficient orthogonal translation was observed for the OT assembly (the black arrow indicates a bright, highly mCherry-positive population). Shown in the dot plots are the sums of at least three independent experiments. Axes indicate fluorescence intensity in arbitrary units.

[0108] FIG. 2E shows FFC plots for the OT assembly selectively translating Opal and Ochre codons only of recruited mRNA(mCherry^{185TGA})::ms2 and mRNA(mCherry^{185TAA})::ms2, respectively.

[0109] FIG. 3 shows a schematic representation of the constructs composing the following systems: PylRS, MCP::PylRS, FUS::MCP::PylRS and LcK::FUS::PylRS⋅LcK::EWS::MCP.

[0110] FIG. 4 shows the flow cytometry analysis of the dual reporter expression with the 4 different systems depicted in FIG. 3. HEK293T cells were transfected with constructs encoding the dual reporter, tRNA, LcK::FUS::PylRS and LcK::EWS::MCP or PylRS, MCP::PylRS, FUS::MCP::PylRS and pcDNA3.1. Shown is the sum of at least three independent experiments. Axes indicate fluorescence intensity in arbitrary units.

[0111] FIG. 5 shows a bar plot with the ratios of the mean fluorescence intensity of mCherry vs. GFP fluorescence for all the tested systems. Plots represent mean values of at least 3 biological replicates, error bars indicate standard error of means.

[0112] FIG. 6 provides an overview of different approaches of the present invention for generating OT organelles, which target to the surface of different intra-cellular structures. Different constructs are expressed and the results of the respective fluorescence flow cytometry (FFC) analyses are shown. On top of the figure the dual color reporter construct GFP^{39TAG}.mCherry^{185TAG}::ms2 (see also FIG. 2B) as applied in each of the schematically illustrated experiments A to G is depicted and a schematic illustration of different targeted cellular compartments is shown. Control experiments performed without the effector polypeptide MCP (-MCP) are also illustrated for each of the experiments A to G:

[0113] A: OT organelle targeted to microtubules and obtained by expressing the system KIF16B₁₋₄₀₀::FUS::PylRS⋅KIF16B₁₋₄₀₀::EWSR1::MCP or the construct KIF16B₁₋₄₀₀::FUS::PylRS (control);

[0114] B: OT organelle targeted to microtubule plus ends and obtained by expressing the constructs EB1::FUS::MCP::PylRS or EB1::FUS::PylRS (control).

[0115] C: OT organelle targeted to plasma membrane and obtained by expressing the system LcK::FUS::PylRS⋅LcK::EWSR1::MCP or the construct LcK::FUS::PylRS (control).

[0116] D: OT organelle targeted to mitochondrial membrane and obtained by expressing the system TOM20₁₋₇₀::FUS::PylRS⋅TOM20₁₋₇₀::EWSR1::MCP or the construct TOM20₁₋₇₀::FUS::PylRS (control).

[0117] E: OT organelle targeted to nuclear membrane and obtained by expressing the system CG1::FUS::PylRS⋅CG1::EWSR1::MCP or the construct CG1::FUS::PylRS (control).

[0118] F (left side): OT organelle targeted to Golgi membrane and obtained by expressing the system EBAG9₁₋₂₉::FUS::PylRS⋅EBAG9₁₋₂₉::EWSR1::MCP or the construct EBAG9₁₋₂₉::FUS::PylRS (control).

[0119] F (right side): OT organelle targeted to Golgi membrane and obtained by expressing the system CMP Sia Tr::FUS::PylRS⋅CMP Sia Tr::MCP or the construct CMP Sia Tr::FUS::PylRS (control).

[0120] G: OT organelle targeted to ER membrane and obtained by expressing the system P450 2C1₁₋₂₇::FUS::PylRS⋅P450 2C1₁₋₂₇::EWSR1::MCP or the construct P450 2C1₁₋₂₇::FUS::PylRS (control).

[0121] FIG. 7 provides an overview of different approaches of the present invention for recruiting RNA using the interaction of different RNA loops and respective RNA targeting proteins. The results of the respective fluorescence flow cytometry (FFC) analyses are shown and compared to the respective analysis as obtained for non-targeted PylRS alone:

[0122] A: System ms-2-MCP incorporates the ms2 loops in the UTR of an mRNA molecule and recruits the mRNA with the MCP protein into the artificial organelle.

[0123] B: System boxB-λ_{N22} incorporates the boxB loops in the UTR of an mRNA molecule and recruits the mRNA with the λ_{N22} protein into the artificial organelle C: System pp7-PCP incorporates the pp7 loops in the UTR of an mRNA molecule and recruits the mRNA with the PCP protein into the artificial organelle.

[0124] FIG. 8 illustrates a further approach of the present invention for generating OT organelles which will work on the surface of different cellular structures. Here the targeting to plasma membrane is exemplified. The particular approach is characterized by the pairwise incorporation of so-called synthetic heterodimeric-coiled coil peptides SYNZIP1 and SYNZIP2 fused into the system LcK::FUS::SYNZIP1::PylRS⋅EWSR1::SYNZIP2::MCP; upon expression SYNZIP1 and 2 pair and recruit MCP to a plasma membrane based OT organelle which in turn enables the selective orthogonal translation of a subsequently recruited mRNA comprising the ms2 targeting nucleotide loops. Selective translation is illustrated by the results of the respective FFC analysis (A). In a comparative approach with the system LcK::FUS::PylRS⋅EWSR1::SYNZIP2::MCP, wherein SYNZIP1 is missing, no selectivity of translation could be observed (B).

### DETAILED DESCRIPTION OF THE INVENTION

[0125] Unless otherwise defined herein, scientific and technical terms as used in the context of the present invention shall have the meanings that are commonly understood by those of ordinary skill in the art. The meaning and scope of the terms should be clear. However, in the event of any latent ambiguity, definitions provided herein take precedent over any dictionary or extrinsic definition. Further, unless otherwise required by context, singular terms shall include pluralities and plural terms shall include the singular.

[0126] If not otherwise stated, nucleotide sequences are depicted herein in the 5′ to 3′ direction. If not otherwise stated, amino acid sequences are depicted herein in the direction from N-terminus to C-terminus.

[0127] If not otherwise stated, the polypeptide of interest (POI) that is translationally expressed by the OT system according to the present invention comprises one or more ncAA residues which are encoded in the nucleotide sequence encoding the POI (CS^{POI}) by selector codons.

[0128] 1. Fusion Proteins

[0129] 1.1. General

[0130] The fusion proteins of the invention may be construed in different manner.

[0131] A first type includes fusion proteins wherein at least two types of effector polypeptides (EPs), comprising at least one RNA-TP and at least one O-RS, are comprised by one and the same fusion protein (also designated as RNA-TP/O-RS fusion proteins).

[0132] A second type includes fusion proteins which comprise at least one assembler polypeptide (AP) and at least one type of EP selected from RNA-TP segments and O-RS segments (also designated AFPs). In particular, AFPs can comprise both RNA-TP and O-RS segments, such as one or more RNA-TP segments and one or more O-RS segments in any sequential order, in addition to the at least one type of AP. Thus, AFPs in particular are selected from the following fusion protein types (segments functionally linked in any order within the polypeptide chain; one or more segments of the same type in any order within the polypeptide chain):

[0133] (RNA-TP/AP)

[0134] (O-RS/AP)

[0135] (RNA-TP/O-RS/AP)

[0136] APs are selected from IC-TPs and PSPs, and may be composed of one or more IC-TPs and/or one or more of PSPs in any sequential order. Thus, AFPs more particularly are selected from the following fusion protein types (segments functionally linked in any order within the polypeptide chain; one or more segments of the same type in any order within the polypeptide chain):

[0137] (RNA-TP/IC-TP)

[0138] (O-RS/IC-TP)

[0139] (RNA-TP/O-RS/IC-TP)

[0140] (RNA-TP/PSP)

[0141] (O-RS/PSP)

[0142] (RNA-TP/O-RS/PSP)

[0143] (RNA-TP/PSP/IC-TP)

[0144] (O-RS/PSP/IC-TP)

[0145] (RNA-TP/O-RS/PSP/IC-TP)

[0146] APs and/or EPs may also comprise (as part of the fusion protein) heterooligomer forming, in particular heterodimer forming polypeptide segments, like in particular synthetic coiled coil SYNZIP peptides. AFP combinations comprising such interacting SYNZIP pairs distributed between members of said AFP combination, so that each AFP comprises merely one member of such interacting SYNZIP pair are particular embodiments.

[0147] The term “segment” as used herein in the context of fusion proteins indicates that the thus designated element (e.g., RNA-TP, O-RS, IC-TP, PSP, SYNZIP) is part of the fusion protein, i.e. linked to the remainder of the fusion protein. The segments of the fusion proteins of the invention are functionally linked, i.e. linked such that they still function as RNA-TP, O-RS, IC-TP and PSP or SYNZIP, respectively. Said linkage is preferably covalent, and in particular is a peptidic linkage.

[0148] For example, the RNA-TP segment comprised in the fusion proteins of the present invention is a segment of the fusion protein that is derived from, and functions in the context of the fusion protein as, an RNA-TP, thus allowing the fusion protein to interact with (bind to) the targeted RNA, wherein said interaction is expediently a specific one. Thus, an RNA-TP segment may comprise the (entire) amino acid sequence, or a functional fragment, of an RNA-targeting polypeptide as described herein.

[0149] Analogously, an O-RS segment comprised by the fusion proteins of the present invention is a segment of the fusion protein that is derived from, and functions in the context of the fusion protein as, an O-RS, thus conferring to the fusion protein O-RS enzymatic activity, that is the ability to catalyze the aminoacylation of an O-tRNA with an ncAA. Thus, an O-RS segment may comprise the (entire) amino acid sequence, or a functional fragment, of an O-RS as described herein.

[0150] The assembler fusion proteins (AFPs) described herein comprise at least one polypeptide segment acting as an assembler (AP). As used herein the term AP refers to any polypeptide segment that allows for enrichment of AFPs comprising said segment at spatially distinct sites within a living cell. Expediently said spatially distinct sites are located within, or directly adjacent to, the cytoplasm of the cell and readily accessible to the translational machinery of the cell (which includes canonical aminoacylated tRNAs, translation factors, ribosomal subunits, etc.) as well as the O-tRNAs which allow for the introduction of the ncAA residues into the POI.

[0151] There are different types of polypeptide segments which can serve as APs in the present invention. One type of APs are polypeptide segments which are derived from, and function in the context of the fusion protein as, intracellular targeting polypeptides (IC-TPs). These IC-TP segments may comprise the (entire) amino acid sequence, or a function fragment, of an IC-TP. IC-TPs target, and thus become locally enriched at, intracellular structural elements within, or directly adjacent to, the cytoplasm. Examples of such structural elements include microtubules, the cytoplasmic side of membranes such as the cell membrane, the nuclear membrane, the mitochondrial membrane, the Golgi membrane, the ER membrane, etc.

[0152] Accordingly, in particular embodiments, the fusion protein of the present invention comprises at least one IC-TP segment that targets, and facilitates local enrichment of the fusion protein at, microtubules, in particular the plus end or the minus end of the microtubules). For instance, dyneins and kinesins (proteins of the dynein or kinesin family of proteins), and functional fragments and mutants thereof, can be used as IC-TPs for such function.

[0153] In further particular embodiments, the fusion protein of the present invention comprises at least one IC-TP segment that is derived from, and functions as, a membrane anchor. For example, the fusion protein of the present invention comprises at least one IC-TP segment that targets, and facilitates local enrichment of the fusion protein at, the (inner) cell membrane (in particular the cytoplasmic side of the cell membrane). In another example, the fusion protein of the present invention comprises at least one IC-TP segment that targets, and facilitates local enrichment of the fusion protein at, the (outer) nuclear membrane (in particular the cytoplasmic side of the nuclear membrane). In further particular embodiments, the fusion protein of the present invention comprises at least one IC-TP segment that targets, and facilitates local enrichment of the fusion protein at, the outer mitochondrial membrane (in particular the cytoplasmic side of the mitochondrial membrane). In further particular embodiments, the fusion protein of the present invention comprises at least one IC-TP segment that targets, and facilitates local enrichment of the fusion protein at, the outer ER membrane (in particular the cytoplasmic side of the ER membrane). In further particular embodiments, the fusion protein of the present invention comprises at least one IC-TP segment that targets, and facilitates local enrichment of the fusion protein at, the outer Golgi membrane (in particular the cytoplasmic side of the Golgi membrane). For instance, the transmembrane domain of membrane proteins, and functional fragments and mutants thereof, can be used as IC-TPs for such function.

[0154] Polypeptides which target, and thus become locally enriched at, intracellular structural elements as described above, are known in the art and are useful as IC-TPs in the present invention. Specific examples of suitable IC-TPs include, but are not limited to:
[0155] optionally truncated kinesin polypeptides which constitutively move towards, and become locally enriched at, microtubule-plus ends in living cells, for example optionally truncated kinesin family member 16B (KIF16B), e.g. optionally truncated Homo sapiens KIF16B (Uniprot: Q96L93), in particular the fragment covering KIF16B amino acid residues 1-400 (KIF16B₁₋₄₀₀) comprising the amino acid sequence of SEQ ID NO:20; or optionally truncated kinesin family member 13A (KIF13A), e.g. optionally truncated Homo sapiens KIF13A (Uniprot: Q9H1H9), in particular the KIF13A fragment covering amino acid residues 1-411 wherein P390 is deleted (KIF13A_{1-411,Δ390}) comprising the amino acid sequence of SEQ ID NO:22; polypeptides EB1, a microtubule tip binding protein, that binds to growing microtubule plus ends (Nehlig A, Molina A, Rodrigues-Ferreira S, Honoré S, Nahmias C. Regulation of end-binding protein EB1 in the control of microtubule dynamics. Cell Mol Life Sci. 2017; 74(13):2381-2393. doi:10.1007/s00018-017-2476-2) (Uniprot: Q15691) and hence targets the organelle to microtubule-plus ends and comprising the amino acid sequence of SEQ ID NO:302
[0156] polypeptides targeting the outer mitochondrial membrane derived from transmembrane-proteins such as, e.g., optionally truncated translocase of outer mitochondrial membrane 20 (TOMM20), for example optionally truncated Homo sapiens TOMM20 (Uniprot: Q15388), in particular the fragment covering amino acid residues 1-70 of TOMM20 (TOMM20₁₋₇₀) comprising the amino acid sequence of SEQ ID NO:24;
[0157] cell membrane-targeting polypeptides derived from transmembrane-proteins such as, e.g., lymphocyte-specific protein tyrosine kinase (LcK; e.g., Mus musculus LcK, Uniprot: P06240), CD4 (e.g., Mus musculus CD4, Uniprot: P06332), FRB (similar to Homo sapiens mTOR; Uniprot: P42345), CD28 (e.g., Mus musculus CD28, Uniprot: P31041) and combinations thereof, in particular polypeptides comprising the amino acid sequence of SEQ ID NO:26, SEQ ID NO:28 or SEQ ID NO:30;
[0158] polypeptides CG1, a nucleoporin that binds to the cytoplasmic side of the nuclear pore complex (Fernandez-Martinez J, Kim S J, Shi Y, et al. Structure and Function of the Nuclear Pore Complex Cytoplasmic mRNA Export Platform. Cell. 2016; 167(5):1215-1228.e25. doi:10.1016/j.cell.2016.10.028) (also designated Nup42) (Uniprot: 015504) targeting the cytoplasmic side of the nuclear membrane comprising the amino acid sequence of SEQ ID NO:304
[0159] polypeptides EBAG9, Golgi membrane protein with one transmembrane helix (Engelsberg A, Hermosilla R, Karsten U, Schulein R, Dörken B, Rehm A. The Golgi protein RCAS1 controls cell surface expression of tumor-associated O-linked glycan antigens. J Biol Chem. 2003; 278(25):22998-23007. doi:10.1074/jbc.M301361200 (Uniprot: 000559) targeting the cytoplasmic side of the Golgi membrane comprising the amino acid sequence of SEQ ID NO:292 (full length) or comprising the first 29 N-terminal amino acid residues of SEQ ID NO:294; or polypeptides CMP Sia Tr, the CMP sialic acid transporter, a Golgi protein with 10 transmembrane helices (Eckhardt M, Gotza B, Gerardy-Schahn R. Membrane topology of the mammalian CMP-sialic acid transporter. J Biol Chem. 1999; 274(13):8779-8787. doi:10.1074/jbc.274.13.8779) (Uniprot: P78382) targeting the cytoplasmic side of the Golgi membrane comprising the amino acid sequence of SEQ ID NO:296
[0160] polypeptide fragments of P450 2C1, a endoplasmic reticulum resident protein (Fazal F M, Han S, Parker K R, et al. Atlas of Subcellular RNA Localization Revealed by APEX-Seq. Cell. 2019; 178(2):473-490.e26. doi:10.1016/j.cell.2019.05.027) (Uniprot: P78382) targeting the cytoplasmic side of the ER membrane in particular a fragment comprising the N-terminal first 27 (SEQ ID NO:298); or the first 29 (SEQ ID NO:300); amino acid residues
[0161] The transmembrane protein stomatin-like protein 3 (SLP-3) (membrane comprising the amino acid sequence of SEQ ID NO:310; aa 1-59 (Homo sapiens, Uniprot: Q8TAV4), localizing to the plasma membrane and vesicular membranes (Lapatsina L, Jira J A, Smith E S, et al. Regulation of ASIC channels by a stomatin/STOML3 complex located in a mobile vesicle pool in sensory neurons. Open Biol. 2012; 2(6):120096. doi:10.1098/rsob.120096)

[0162] as well as functional fragments and mutants of these polypeptides. Said functional fragments and mutants may have at least 60%, at least 70%, at least 80%, at least 90%, at least 95%, at least 96%, at least 97%, at least 98% or at least 99% amino acid sequence identity to the amino acid of the polypeptide they are derived from.

[0163] A further type of APs are polypeptide segments, which are derived from, and function in the context of the fusion protein as, phase separation polypeptides (PSPs). PSPs are polypeptides, which have the ability to self-assemble in the cytoplasm of a cell so as to create sites of high local concentration in the cytoplasm. Specifically, PSPs are able to drive phase separation (in particular liquid-liquid phase separation) leading to the formation of membrane-less compartments in the cytoplasm. Said compartments may take the form of droplets, aggregates, condensates or a dense phase. In particular, PSPs include intrinsically disordered proteins (IDPs) which are an important class of proteins that drive phase separation (see, e.g., Alberti et al., Bioessays 2016, 38:959-968 and references cited therein such as Patel et al., Cell 2015, 162:1066-1077; Han et al., Cell 2012, 149:768-779; Kato et al., Cell 2012, 149:753-767). There are three different classes of ICPs, proteins of each, or functional fragments or mutants thereof, can be used as PSPs in the present invention. One prominent class of IDPs contains so called prion-like domains which are devoid of charges and contain polar amino acid residues (Q, N, S, G) with interspersed aromatic residues (F, Y). See, e.g., Malinovska et al., Biochim Biophys Acta 2013, 1834:918-931; Alberti et al., 2009, Cell 137:146-158, Malinovska et al., Prion 2015, 9:339-346. Another class of IDPs is also characterized by low sequence complexity but frequently contains acidic and basic amino acid side chains, e.g. RGG repeat containing IDPs such as Ddx4. See Nott et al., Cell 2015, 57:936-947. Specific examples of suitable IC-TPs include, but are not limited to:
[0164] spindle-defective protein 5 (SPD5) (e.g., Caenorhabditis elegans SPD5; Uniprot: P91349), in particular a polypeptide comprising the amino acid sequence of SEQ ID NO:32;
[0165] fused-in sarcoma (FUS) (e.g., Homo sapiens FUS; Uniprot: P35637), in particular a polypeptide comprising the amino acid sequence of SEQ ID NO:34;
[0166] Ewing sarcoma breakpoint region 1 (EWSR1) (e.g., Homo sapiens EWSR1; Uniprot: Q01844), in particular a polypeptide comprising the amino acid sequence of SEQ ID NO:36;
[0167] ATP-dependent RNA helicase laf-1 (RGG domain, 1-168, LAF-1 membrane comprising the amino acid sequence of SEQ ID NO:308); (Caenorhabditis elegans, Uniprot: DOPV95), (Schuster B S, Reed E H, Parthasarathy R, et al. Controllable protein phase separation and modular recruitment to form responsive membraneless organelles. Nat Commun. 2018; 9(1):2985. Published 2018 Jul. 30. doi:10.1038/s41467-018-05403-1)

[0168] as well as functional fragments and mutants of these polypeptides. Said functional fragments and mutants may comprise at least 60%, at least 70%, at least 80%, at least 90%, at least 95%, at least 96%, at least 97%, at least 98% or at least 99% amino acid sequence identity to the amino acid of the polypeptide they are derived from.

[0169] The number of APs comprised by fusion proteins of the present invention is not particularly limited, i.e. a fusion protein may comprise 1, 2, 3, 4, 5, 6, 7, 8, 9, 10 or more same or different APs. Fusion proteins of the present invention which comprise at least one AP selected from IC-TP segments and at least one AP selected from PSP segments are particularly preferred. Likewise, the number of RNA-TP segments is not particularly limited and may be independently selected from 1, 2, 3, 4, 5 or more, as for example 6, 7, 8, 9 or 10, different or same RNA-TP segments. Likewise, the number of O-RS segments is not particularly limited and may be independently selected from 1, 2, 3, 4, 5 or more, as for example 6, 7, 8, 9 or 10, different or same O-RS segments. This applies to both AFPs as well as to RNA-TP/O-RS fusion proteins. The number of segments in the fusion proteins of the present invention of course influences the size of the fusion protein that is not particularly limited but typically less than 3500 amino acid residues, such as less than 3000 amino acid residues.

[0170] The order of the segments within the fusion proteins of the invention is not particularly limited either. The RNA-TP, O-RS and/or AP segments may thus be functionally linked in any order.

[0171] Examples of RNA-TP/O-RS fusion protein structures (comprising both types of EP segments) include, but are not limited to,
[0172] [RNA-TP]ₓ-[O-RS]_{y}
[0173] [O-RS]_{y}-[RNA-TP]ₓ

[0174] wherein x and y, independently of each other, are integers selected from 1, 2, 3, 4 and 5; “-” designates a peptidic linkage.

[0175] [RNA-TP]ₓ for x>2 may include the same or different RNA-TP segments. [O-RS]_{y} for y≥2 may include the same or different O-RS segments.

[0176] Examples of RNA-TP/O-RS fusion protein structures include, but are not limited to:

[0177] [IC-TP]ₘ-[EP]ₒ

[0178] [EP]ₒ-[IC-TP]ₘ

[0179] [PSP]ₙ-[EP]ₒ

[0180] [EP]ₒ-[PSP]ₙ

[0181] [IC-TP]ₘ-[EP]ₒ-[PSP]ₙ

[0182] [PSP]ₙ-[EP]ₒ-[IC-TP]ₘ

[0183] [IC-TP]ₘ-[PSP]ₙ-[EP]ₒ

[0184] [EP]ₒ-[PSP]ₙ-[IC-TP]ₘ

[0185] [PSP]ₙ-[IC-TP]ₘ-[EP]ₒ

[0186] [EP]ₒ-[IC-TP]ₘ-[PSP]ₙ

[0187] wherein m, n and o, independently of each other, are integers selected from 1, 2, 3, 4 or 5, or are selected from 1, 2, 3, 4, 5, 6 and “-” designates a peptidic linkage.

[0188] In a preferred embodiment “m” is the integer 1.

[0189] In another preferred embodiment “n” is an integer selected from 1 and 2.

[0190] In still another preferred embodiment “o” is an integer selected from 1, 2, 3, 4, 5 or 6 if EP is selected from RNA-TPs.

[0191] In still another preferred embodiment “o” is an integer selected from 1 or 2, if EP is selected from O-RSs.

[0192] In still another preferred embodiment of RNA-TP/O-RS fusion protein structures those are preferred wherein at least one ICT-TP takes a C- or N-terminal position within the polypeptide chain.

[0193] In still another preferred embodiment of RNA-TP/O-RS fusion protein structures those are preferred wherein at least one EP takes a C- or N-terminal position within the polypeptide chain.

[0194] In still another preferred embodiment of RNA-TP/O-RS fusion protein structures those are preferred wherein at least one ICT-TP takes a C- or N-terminal position within the polypeptide chain while at least one EP takes a N- or C-terminal position, respectively, within the polypeptide chain. Any PSP, if present in such structure, is positioned within the polypeptide chain.

[0195] [IC-TP]ₘ for m≥2 may include the same or different IC-TP segments. Preferably IC-TPs of the same functionality (targeting the same type of cellular structure (as for example same membrane type or type or organelle) are applied. [PSP]ₙ for n≥2 may include the same or different PSP segments. [EP]ₒ for o≥2 may include the same or different EPs. Where [EP]ₒ includes different EPs, for example at least one EP may be a RNA-TP segment and at least one may be an O-RS segment.

[0196] The fusion proteins of the present invention provide an orthogonal translation (OT) system wherein the one or more O-RS (segments) required for the introduction of the one or more ncAA residues into the POI are brought into spatial proximity to at least one RNA-targeting polypeptide (RNA-TP) segment. The mRNA of the POI comprises at least one targeting nucleotide sequence (TN) that is able to interact with an RNA-TP segment of at least one of the fusion proteins of the OT system. Said interaction is expediently a specific one. The RNA-TP segments of the fusion proteins of the invention are preferably mRNA-targeting polypeptide segments. The RNA-TP segment of the fusion protein and the TN of the POI mRNA are expediently chosen so as to specifically interact with (bind to) one another. Suitable pairs of RNA-TP segment and TN for this purpose can be selected from coat proteins of RNA viruses and the nucleic acid motifs bound by said coat proteins. Such viral coat proteins and protein-bound RNA motifs are known in the art.

[0197] Specific examples of suitable RNA-TPs include, but are not limited to:
[0198] MCP (coat protein of Enterobacteria phage MS2), in particular a polypeptide comprising the amino acid sequence of SEQ ID NO:14;
[0199] λ_{N22} (22 amino acid RNA-binding domain of lambda phage antiterminator protein N), in particular a polypeptide comprising the amino acid sequence of SEQ ID NO:16;
[0200] PCP (coat protein of Bacteriophage PP7, Wu B, Chao J A, Singer R H. Fluorescence fluctuation spectroscopy enables quantitative imaging of single mRNAs in living cells. Biophys J. 2012; 102(12):2936-2944. doi:10.1016/j.bpj.2012.05.017), in particular a polypeptide comprising the amino acid sequence of SEQ ID NO:306;
[0201] as well as functional fragments and mutants of these polypeptides. Said functional fragments and mutants may comprise at least 60%, at least 70%, at least 80%, at least 90%, at least 95%, at least 96%, at least 97%, at least 98% or at least 99% amino acid sequence identity to the amino acid of the polypeptide they are derived from.

[0202] Specific examples of suitable TNs include, but are not limited to:
[0203] Enterobacteria phage MS2 RNA stem-loop, in particular a polynucleotide having an RNA sequence corresponding to (encoded by) the nucleotide (DNA) sequence of SEQ ID NO:17;
[0204] BoxB (lambda phase RNA stem-loop, specific binding site of λ_{N22}), in particular a polynucleotide having an RNA sequence corresponding to (encoded by) the nucleotide (DNA) sequence of SEQ ID NO:18;
[0205] Bacteriophage pp7 RNA stem loops (Wu B, Chao J A, Singer R H. Fluorescence fluctuation spectroscopy enables quantitative imaging of single mRNAs in living cells. Biophys J. 2012; 102(12):2936-2944. doi:10.1016/j.bpj.2012.05.017) in particular a polynucleotide having an RNA sequence corresponding to (encoded by) the nucleotide (DNA) sequence of SEQ ID NO:289 or SEQ ID NO:290

[0206] as well as functional fragments and mutants thereof. Said functional fragments and mutants may comprise at least 60%, at least 70%, at least 80%, at least 90%, at least 95%, at least 96%, at least 97%, at least 98% or at least 99% nucleotide sequence identity to the polynucleotide sequences they are derived from.

[0207] Such TNs may be used as a single copy segment or as multiple copy segment composed of more than one, as for example two, three, four, five, six or more repetitive units of the TN.

[0208] MCP specifically interacts with MS2 RNA stem-loops. Thus, where the RNA-TP segment(s) of the fusion protein(s) comprise (consist of) segments which are derived from, and function as, MCP, the mRNA of the POI expediently comprises one or more MS2 RNA stem-loops, e.g. two, three, four, five or six MS2 RNA stem-loops. λ_{N22} specifically interacts with BoxB. Thus, where the RNA-TP segment(s) of the fusion protein(s) comprise (or consist of) segments which are derived from, and function as, λ_{N22}, the mRNA of the POI expediently comprises one or more BoxB motifs, e.g. one, two, three, four, five or six or more BoxB motifs. PCP specifically interacts with pp7 RNA stem-loops. Thus, where the RNA-TP segment(s) of the fusion protein(s) comprise (consist of) segments which are derived from, and function as, PCP, the mRNA of the POI expediently comprises one or more pp7 RNA stem-loops, e.g. two, three, four, five or six or more pp7 RNA stem-loops.

[0209] Several RSs have been used for genetic code expansion including the Methanococcus jannaschii tyrosyl-tRNA synthetase, E. coli tyrosyl-tRNA synthetase, E. coli leucyl-tRNA synthetase pyrrolysyl-tRNA synthetases from certain Methanosarcina (such as M. mazei, M. barkeri, M. acetivorans, M. thermophila), Methanococcoides (M. burtonii) or Desulfitobacterium (D. hafniense). Corresponding orthogonal RS/tRNA pairs have been used to genetically encode a variety of functionalities in polypeptides (Chin, Annu Rev Biochem 2014, 83:379-408; Chin et al., J Am Chem Soc 2001, 124:9026; Chin et al., Science 2003, 301:964; Nguyen et al., J Am Chem Soc 2009, 131:8720; Yanagisawa et al., Chem Biol 2008, 15:1187). Depending on the cell used for the translation of the POI, these RS can be used as O-RS in the present invention.

[0210] Pyrrolysyl tRNA synthetases (PylRSs) which can be used in methods and fusion proteins of the invention may be wildtype or genetically engineered PylRSs. Examples for wildtype PylRSs include, but are not limited to PylRSs from archaebacteria and eubacteria such as Methanosarcina maize, Methanosarcina barkeri, Methanococcoides burtonii, Methanosarcina acetivorans, Methanosarcina thermophila and Desulfitobacterium hafniense. Genetically engineered PylRSs have been described, for example, by Neumann et al. (Nat Chem Biol 2008, 4:232), by Yanagisawa et al. (Chem Biol 2008, 15:1187), and in EP2192185A1. The efficiency of genetic code expansion using PylRS can be increased by modifying the amino acid sequence of the PylRS such that it is not directed to the nucleus. To this end, the nuclear localization signal (NLS) can be removed from the PylRS or can be overridden by introducing a suitable nuclear export signal (NES). PylRSs which are used in the fusion proteins and methods of the present invention may be PylRSs lacking the NLS and/or comprising a NES as described, e.g., in WO 2018/069481.

[0211] Accordingly, examples of O-RS segment(s) which can be used in the fusion proteins of the present invention include, but are not limited to:
[0212] Methanococcus jannaschii tyrosyl-tRNA synthetase;
[0213] Escherichia coli tyrosyl-tRNA synthetase;
[0214] Escherichia coli leucyl-tRNA synthetase;
[0215] Methanosarcina mazei pyrrolysyl-tRNA synthetase;
[0216] Methanosarcina barkeri pyrrolysyl-tRNA synthetase;
[0217] Methanosarcina acetivorans pyrrolysyl-tRNA synthetase;
[0218] Methanosarcina thermophila pyrrolysyl-tRNA synthetase;
[0219] Methanococcoides burtonii pyrrolysyl-tRNA synthetase;
[0220] Desulfitobacterium hafniense pyrrolysyl-tRNA synthetase;
[0221] as well as functional (i.e., enzymatically active) fragments and mutants of these polypeptides. Said functional fragments and mutants may comprise at least 60%, at least 70%, at least 80%, at least 90%, at least 95%, at least 96%, at least 97%, at least 98% or at least 99% amino acid sequence identity to the aminoacyl tRNA synthetase they are derived from.

[0222] Particular examples of O-RS segments useful as in the present invention which are derived from M. mazei pyrrolysyl-tRNA synthetases include, but are not limited to:
[0223] O-RS segments derived from PylRS^{AF} (Methanosarcina mazei pyrrolysyl tRNA synthetase double mutant: Y306A, Y384F; Uniprot: Q8PWY1), for example O-RS segments comprising the amino acid sequence of SEQ ID NO:8;
[0224] O-RS segments derived from PylRS^{AA} (Methanosarcina mazei pyrrolysyl tRNA synthetase double mutant: N346A, C348A; Uniprot: Q8PWY1), for example O-RS segments comprising the amino acid sequence of SEQ ID NO:10;
[0225] O-RS segments derived from PylRS^{AAAF} (Methanosarcina mazei pyrrolysyl tRNA synthetase quadruple mutant: Y306A, N346A, C348A, Y384F; Uniprot: Q8PWY1), for example O-RS segments comprising the amino acid sequence of SEQ ID NO:12;
[0226] O-RS segment derived from IFRS1, a Methanosarcina mazei pyrrolysyl tRNA mutant (L305M, Y306L, L309S, N346S, C348M), for example O-RS segments comprising the amino acid sequence of SEQ ID NO:224
[0227] O-RS segment derived from CbzRS, a Methanosarcina mazei pyrrolysyl tRNA mutant (Y306M, L309G, C348T), for example O-RS segments comprising the amino acid sequence of SEQ ID NO:226
[0228] O-RS segment derived from CpkRS, a Methanosarcina mazei pyrrolysyl tRNA mutant (A302S), for example O-RS segments comprising the amino acid sequence of SEQ ID NO:228
[0229] O-RS segment derived from OMeRS, a Methanosarcina mazei pyrrolysyl tRNA mutant: (A302T, Y384F, N346V, C348W, V401L), for example O-RS segments comprising the amino acid sequence of SEQ ID NO:236

[0230] as well as functional (i.e., enzymatically active) fragments and mutants of these polypeptide segments. Said functional fragments and mutants may comprise at least 60%, at least 70%, at least 80%, at least 90%, at least 95%, at least 96%, at least 97%, at least 98% or at least 99% amino acid sequence identity to the aminoacyl tRNA synthetase they are derived from.

[0231] According to particular embodiments, wild-type and mutant M. mazei PylRSs as described herein are used for aminoacylation of tRNA with ncAAs as described in WO2012/104422 or WO2015/107064. Exemplary ncAAs for this purpose include, but are not limited to, 2-amino-6-(cyclooct-2-yn-1-yloxycarbonylamino)hexanoic acid (SCO), 2-amino-6-(cyclooct-2-yn-1-yloxyethoxycarbonylamino)hexanoid acid, 2-amino-6[(4E-cyclooct-4-en-1-yl)oxycarbonylamino]hexanoic acid (TCO), 2-amino-6[(2E-cyclooct-2-en-1-yl)oxycarbonylamino]hexanoic acid (TCO*), 2-amino-6-(prop-2-ynoxycarbonylamino)hexanoic acid (PrK) and 2-amino-6-(9-biocyclo[6.1.0]non-4-ynylmethoxycarbonylamino)hexanoid acid (BCN).

[0232] In another embodiment of the present invention, the above-mentioned AP (IC-TP and PSP) segments and/or the above mentioned EP (RNA-TP and O-RS) segments, independently of each other, may be further combined with natural or, more particularly, synthetic protein segments, which induce and control macromolecular interactions. In particular, such further protein segments are operably fused into the polypeptide chain of an AFP of the invention. One or more, like 2, 3, 4, 5, 6, 7, 8, 9 or 10, preferably however one such protein segment may be operably fused into a single AFP of the invention. Fusion into the AFP polypeptide chain should be such that the activity of the other polypeptide segments, AP and EP, is substantially unaffected, in particular not inhibited (i.e. AP and EP remain operable), while the ability of the additional polypeptide segment to induce and control macromolecular interactions is retained. Described in literature are so-called SYNZIP peptides, forming multimeric structures. Of particular interest in the context of the invention are SYNZIPs having the ability to form specific heterodimeric coiled-coil protein structures. Such SYNZIPs are pairs of synthetic peptides capable of interacting with each other and are used to induce and control macromolecular interactions. Non-limiting examples are the pairs SYNZIP 1:2; SYNZIP 3:4 and SYNZIP 5:6. Particularly preferred according to the invention is the heterospecific coiled-coil pair SYNZIP2:SYNZIP1 as described by Reinke, A. W., Grant, R. A., Keating, A. E. (2010) J Am Chem Soc 132 6025-6031 (SYNZIP 1: SEQ ID NO:312; SYNZIP 2: SEQ ID NO:314, SYNZIP 3: SEQ ID NO:316; SYNZIP 4: SEQ ID NO:318, as well as functional fragments and mutants of these SYNZIP polypeptides. Said functional fragments and mutants may comprise at least 60%, at least 70%, at least 80%, at least 90%, at least 95%, at least 96%, at least 97%, at least 98% or at least 99% amino acid sequence identity to the amino acid of the polypeptide they are derived from). As a pairwise use is required to induce macromolecular interaction, these SYNZIPs are preferably used pairwise in AFP combinations as described herein. By the interaction of such SYNZIP pairs integrated in different AFP fusion proteins the formation of OT organelles according to the present invention may be further supported.

[0233] In still another embodiment of the present invention a fusion protein of the invention may be further modified by introducing into (fusing of) at least one so-called “epitope tag”, i.e. a short oligopeptide sequence, which serves as antibody binding sites, useful for detecting/quantifying the expressed fusion products of the invention. Non-limiting examples of such tags are the following:

[0234] VSV-G: Vesicular stomatitis virus glycoprotein epitope tag (SEQ ID NO:680)

[0235] HA: Human influence hemagglutinin epitope tag (SEQ ID NO:682)

[0236] Myc: Human c-Myc proto-oncogene epitope tag (SEQ ID NO:684)

[0237] 1.2 Particular Examples of AFP Constructs of the Invention

[0238] Each individual exemplified construct may be construed in the N->C or C->N direction. The depicted schemes are given in the N->C direction.

[0239] In the case of segment blocks [IC-TP]ₘ, [PSP]ₙ, [O-RS]_{y} and [RNA-TP]ₓ, wherein m, n, y or x are an integer >1, the repetitive segments within such block may be identical or different, preferably identical.

[0240] The segments [IC-TP], [PSP], [O-RS], [RNA-TP]ₓ, and [SYNZIP] as applied therein may be prepared from the respective examples of segments described above in section 1.1.

[0241] 1.2.1. Intracellular Structure-Targeting Monofunctional AFPs

[0242] 1.2.1.1 Intracellular Structure-Targeting Monofunctional AFPs (i.e. Comprising One Type of EP) Individually preferred examples thereof are:

[0243] [IC-TP]ₘ-[O-RS]_{y} with m=1 or 2, preferably 1; y=1 or 2, preferably 1;

[0244] [IC-TP]ₘ-[RNA-TP]ₓ with m=1 or 2, preferably 1; x=1, 2, 3, 4, 5 or 6, preferably 2, 3 or 4;

[0245] [IC-TP]ₘ-[PSP]ₙ-[O-RS]_{y} with m=1 or 2, preferably 1; n=1, 2 or 3, preferably 1 or 2; y=1 or 2, preferably 1;

[0246] [IC-TP]ₘ-[PSP]ₙ-[RNA-TP]ₓ with m=1 or 2, preferably 1; n=1, 2 or 3, preferably 1 or 2; x=1, 2, 3, 4, 5 or 6, preferably 2, 3 or 4;

[0247] [IC-TP]ₘ-[O-RS₁]_{y}-[PSP]ₙ-[O-RS₂]_{y} with m=1 or 2, preferably 1; n=1, 2 or 3, preferably 1 or 2; y independently of each other=1 or 2, preferably 1; and O-RS, and O-RS₂ identical or different, preferably identical;

[0248] [IC-TP]ₘ-[PSP₁]ₙ-[O-RS]_{y}-[PSP₂]ₙ with m=1 or 2, preferably 1; n independently of each other 1, 2 or 3, preferably 1 or 2; y independently of each other=1 or 2, preferably 1; and PSP, and PSP₂ identical or different;

[0249] [IC-TP]ₘ-[RNA-TP₁]ₓ-[PSP]ₙ-[RNA-TP₂]ₓ with m=1 or 2, preferably 1; n=1, 2 or 3, preferably 1 or 2; x independently of each other=1, 2, 3, 4, 5 or 6, preferably 2, 3 or 4; and RNA-TP, and RNA-TP₂ identical or different, preferably identical;

[0250] [IC-TP]ₘ-[PSP₁]ₙ-[O-RS₁]_{y}-[PSP₂]ₙ-[O-RS₂]_{y} with m=1 or 2, preferably 1; n independently of each other 1, 2 or 3, preferably 1 or 2; y independently of each other=1 or 2, preferably 1; O-RS, and O-RS₂ identical or different, preferably identical; and PSP, and PSP₂ identical or different;

[0251] [IC-TP]ₘ-[PSP₁]ₙ-[RNA-TP₁]ₓ-[PSP₂]ₙ-[RNA-TP₂]ₓ with m=1 or 2, preferably 1; n independently of each other=1, 2 or 3, preferably 1 or 2; x independently of each other=1, 2, 3, 4, 5 or 6, preferably 2, 3 or 4; RNA-TP, and RNA-TP₂ identical or different; and PSP, and PSP₂ identical or different.

[0252] 1.2.1.2 Intracellular Structure-Targeting Bifunctional AFPs (Comprising Two Types of EP)

[0253] Individually preferred examples thereof are

[0254] [IC-TP]ₘ-[O-RS]_{y}-[RNA-TP]ₓ with m=1 or 2, preferably 1; x=1, 2, 3, 4, 5 or 6, preferably 2, 3 or 4; y=1 or 2, preferably 1;

[0255] [IC-TP]ₘ-[RNA-TP]ₓ-[O-RS]_{y} with m=1 or 2, preferably 1; x=1, 2, 3, 4, 5 or 6, preferably 2, 3 or 4; y=1 or 2, preferably 1;

[0256] [IC-TP]ₘ-[PSP]ₙ-[O-RS]_{y}-[RNA-TP]ₓ with m=1 or 2, preferably 1; n=1, 2 or 3, preferably 1 or 2; x=1, 2, 3, 4, 5 or 6, preferably 2, 3 or 4; y=1 or 2, preferably 1;

[0257] [IC-TP]ₘ-[PSP]ₙ-[RNA-TP]ₓ-[O-RS]_{y} with m=1 or 2, preferably 1; n=1, 2 or 3, preferably 1 or 2; x=1, 2, 3, 4, 5 or 6, preferably 2, 3 or 4; y=1 or 2, preferably 1;

[0258] [IC-TP]ₘ-[O-RS]_{y}-[PSP]ₙ-[RNA-TP]ₓ with m=1 or 2, preferably 1; n=1, 2 or 3, preferably 1 or 2; x=1, 2, 3, 4, 5 or 6, preferably 2, 3 or 4; y=1 or 2, preferably 1;

[0259] [IC-TP]ₘ-[RNA-TP]ₓ-[PSP]ₙ-[O-RS]_{y} with m=1 or 2, preferably 1; n=1, 2 or 3, preferably 1 or 2; x=1, 2, 3, 4, 5 or 6, preferably 2, 3 or 4; y=1 or 2, preferably 1;

[0260] [IC-TP]ₘ-[PSP₁]ₙ-[O-RS]_{y}-[PSP₂]ₙ-[RNA-TP]ₓ with m=1 or 2, preferably 1; n independent of each n=1, 2 or 3, preferably 1 or 2; x=1, 2, 3, 4, 5 or 6, preferably 2, 3 or 4; y=1 or 2, preferably 1; and PSP, and PSP₂ identical or different;

[0261] [IC-TP]ₘ-[PSP₁]ₙ-[RNA-TP]ₓ-[O-RS₁]_{y}-[PSP₂]ₙ-[O-RS₂]_{y} with m=1 or 2, preferably 1; n independent of each=1, 2 or 3, preferably 1 or 2; x=1, 2, 3, 4, 5 or 6, preferably 2, 3 or 4; y independently of each other=1 or 2, preferably 1; and PSP, and PSP₂ identical or different; and O-RS, and O-RS₂ identical or different, preferably identical;

[0262] [IC-TP]ₘ-[PSP₁]ₙ-[O-RS₁]_{y}-[PSP₂]ₙ-[O-RS₂]_{y}-[RNA-TP]ₓ with m=1 or 2, preferably 1; n independent of each=1, 2 or 3, preferably 1 or 2; x=1, 2, 3, 4, 5 or 6, preferably 2, 3 or 4; y independently of each other=1 or 2, preferably 1; and PSP, and PSP₂ identical or different; and O-RS, and O-RS₂ identical or different, preferably identical.

[0263] 1.2.2. No Intracellular Structure-Targeting Monofunctional AFPs

[0264] These are the same AFPs as listed above in section 1.2.1, with the only exception that the segments [IC-TP] is missing, while the segments [PSP] are retained.

[0265] 1.2.3. SYNZIP Variants

[0266] These are the same AFPs as listed above in sections 1.2.1 and 1.2.2 with the only exception that at least one of the segment [IC-TP], [PSP], [O-RS₂] or [RNA-TP] is N- or C-terminally supplemented with a SYNZIP element. An AFP may contain, 1, 2, 3, 4 or 5, preferably 1 or 2, identical or different, preferably identical SYNZIPs. Non-limiting examples of such molecules are:

[0267] 1.2.3.1 Monofunctional SYNZIP AFPs

[0268] Individually preferred examples thereof are:

[0269] [PSP]ₙ-[SYNZIP]-[O-RS]_{y} with y=1 or 2, preferably 1; n=1, 2 or 3, preferably 1 or 2;

[0270] [PSP]ₙ-[SYNZIP]-[RNA-TP]ₓ with; x=1, 2, 3, 4, 5 or 6, preferably 2, 3 or 4; n=1, 2 or 3, preferably 1 or 2;

[0271] [IC-TP]ₘ-[SYNZIP]-[O-RS]_{y} with m=1 or 2, preferably 1; y=1 or 2, preferably 1;

[0272] [IC-TP]ₘ-[SYNZIP]-[RNA-TP]ₓ with m=1 or 2, preferably 1; x=1, 2, 3, 4, 5 or 6, preferably 2, 3 or 4;

[0273] [IC-TP]ₘ-[PSP]ₙ-[SYNZIP]-[O-RS]_{y} with m=1 or 2, preferably 1; n=1, 2 or 3, preferably 1 or 2; y=1 or 2, preferably 1;

[0274] [IC-TP]ₘ-[PSP]ₙ-[SYNZIP]-[RNA-TP]ₓ with m=1 or 2, preferably 1 n=1, 2 or 3, preferably 1 or 2; x=1, 2, 3, 4, 5 or 6, preferably 2, 3 or 4.

[0275] 1.2.3.2 Bifunctional SYNZIP AFPs

[0276] Individually preferred examples thereof are:

[0277] [IC-TP]ₘ-[O-RS]_{y}-[SYNZIP]-[RNA-TP]ₓ with m=1 or 2, preferably 1; x=1, 2, 3, 4, 5 or 6, preferably 2, 3 or 4; y=1 or 2, preferably 1;

[0278] [IC-TP]ₘ-[RNA-TP]ₓ-[SYNZIP]-[O-RS]_{y} with m=1 or 2, preferably 1; x=1, 2, 3, 4, 5 or 6, preferably 2, 3 or 4; y=1 or 2, preferably 1;

[0279] [IC-TP]ₘ-[PSP]ₙ-[SYNZIP]-[O-RS]_{y}-[RNA-TP]ₓ with m=1 or 2, preferably 1; n=1, 2 or 3, preferably 1 or 2; x=1, 2, 3, 4, 5 or 6, preferably 2, 3 or 4; y=1 or 2, preferably 1;

[0280] [IC-TP]ₘ-[PSP]ₙ-[SYNZIP]-[RNA-TP]ₓ-[O-RS]_{y} with m=1 or 2, preferably 1; n=1, 2 or 3, preferably 1 or 2; x=1, 2, 3, 4, 5 or 6, preferably 2, 3 or 4; y=1 or 2, preferably 1;

[0281] [IC-TP]ₘ-[PSP]ₙ-[SYNZIPₐ]-[O-RS]_{y}-[SYNZIP_{b}]-[RNA-TP]ₓ with m=1 or 2, preferably 1; n=1, 2 or 3, preferably 1 or 2; x=1, 2, 3, 4, 5 or 6, preferably 2, 3 or 4; y=1 or 2, preferably 1; and SYNZIPₐ and SYNZIP_{b} identical or different, preferably identical

[0282] [IC-TP]ₘ-[PSP]ₙ-[SYNZIPₐ]-[RNA-TP]r-[SYNZIP_{b}]-[O-RS]_{y} with m=1 or 2, preferably 1 n=1, 2 or 3, preferably 1 or 2; x=1, 2, 3, 4, 5 or 6, preferably 2, 3 or 4; y=1 or 2, preferably 1; and SYNZIP, and SYNZIP_{b} identical or different, preferably identical

[0283] [IC-TP]ₘ-[PSP₁]ₙ-[SYNZIP]-[RNA-TP]ₓ-[O-RS₁]_{y}-[PSP₂]ₙ-[O-RS₂]_{y} with m=1 or 2, preferably 1 n=1, 2 or 3, preferably 1 or 2; x=1, 2, 3, 4, 5 or 6, preferably 2, 3 or 4; y=1 or 2, preferably 1; and PSP, and PSP₂ identical or different; and O-RS, and O-RS₂ identical or different, preferably identical.

[0284] 1.2.4. Monofunctional Fusion Proteins

[0285] Individually preferred examples thereof are:

[0286] [SYNZIP]-[O-RS]_{y} with y=1 or 2, preferably 1;

[0287] [SYNZIP]-[RNA-TP]ₓ with; x=1, 2, 3, 4, 5 or 6, preferably 2, 3 or 4;

[0288] As IC-TP and PSP is missing here, these may be preferably used in combination with an AFP molecule containing at least one C-TP and/or PSP segment.

[0289] 1.3 Examples of Individual Fusion Proteins

[0290] Very specific examples of fusion protein of the inventions, and particular combinations thereof are listed below in Tables 1, 2 and 3. The content of this Tables 1, 2 and 3 also forms part of general disclosure of the specification and its content is not explicitly and literally repeated here in the general part. The disclosure of Tables 1 and 2 in the respective column designated “Fusion protein(s) comprising O-RS and RNA-TP segments” shall be considered as disclosed independently from the content of the other columns of Tables 1 and 2 referring to specific reports and host cell lines.

[0291] 2. Functional Fragments and Mutants

[0292] Described herein are fragments and mutants of particular RNA-TPs, O-RSs, IC-TPs, PSPs, TNs, as well as SYNZIPs which are functional (i.e. have the RNA-binding activity of the parent RNA-TP, the targeting activity for intracellular structures of the parent IC-TP, the self-assembly activity of the parent PSP, the binding activity for RNA-TP of the parent TN, the enzymatic activity of the parent O-RS, or the heterodimeric coiled-coil formation ability of parent SYNZIPs, respectively). Such fragments and mutants can be characterized by a minimum degree of sequence identity as described herein. Said amino acid or nucleotide sequence identity means identity over the entire length of the thus characterized amino acid or nucleotide sequence, respectively. The percentage identity values can be determined as known in the art on the basis of BLAST alignments, blastp algorithms (protein-protein BLAST), or using the Clustal method (Higgins et al., Comput Appl. Biosci. 1989, 5(2):151-1).

[0293] Fragments and mutants of particular RNA-TPs, O-RSs, IC-TPs, SYNZIPS or PSPs which are useful in the present invention retain the relevant function (binding, self-assembly or enzymatic activity, respectively) of the parent polypeptide and can be obtained, e.g., by conservative amino acid substitution, i.e. the replacement of an amino acid residue with different amino acid residues having similar biochemical properties (e.g. charge, hydrophobicity and size) as known in the art. Typical examples are substitution of Leu by Ile or vice versa, substitution of Asp by Glu or vice versa, substitution of Asn by Gln or vice versa, and others.

[0294] 3. Orthogonal Translation, tRNAs and POI Coding Sequences

[0295] The term “translation system” generally refers to a set of components necessary to incorporate a naturally occurring amino acid in a growing polypeptide chain (protein). Components of a translation system can include, e.g., ribosomes, tRNAs, aminoacyl tRNA synthetases, mRNA and the like. An aminoacyl tRNA synthetase (RS) is an enzyme capable of aminoacylating a tRNA with an amino acid or an amino acid analog. An RS used in processes of the invention is capable of aminoacylating a tRNA with the corresponding ncAA, i.e. aminoacylating a tRNA^{ncAA}. The term “orthogonal” as used herein refers to an element of a translation system (e.g., an orthogonal tRNA (O-tRNA) and/or an orthogonal aminoacyl tRNA synthetase (O-RS)) that is used with reduced efficiency by a translation system of interest (e.g., a cell). “Orthogonal” refers to the inability or reduced efficiency, e.g., less than 20% efficient, less than 10% efficient, less than 5% efficient, or e.g., less than 1% efficient, of an O-tRNA or an O-RS to function with the endogenous RS or endogenous tRNAs, respectively, of a translation system of interest. For example, an O-tRNA in a translation system of interest is aminoacylated by any endogenous RA of the translation system with reduced or even zero efficiency, when compared to aminoacylation of an endogenous tRNA by the endogenous RS. In another example, an O-RS aminoacylates any endogenous tRNA in the translation system of interest with reduced or even zero efficiency, as compared to aminoacylation of the endogenous tRNA by an endogenous RS. Specifically, the term “orthogonal translation system” or “OT system” is used herein to refer to a translation system using an O-RS/O-tRNA^{ncAA} pair that allows for introducing ncAA residues into a growing polypeptide chain.

[0296] O-RS/O-tRNA^{ncAA} pairs used in the invention preferably have following properties: the O-tRNA^{ncAA} is preferentially aminoacylated with the ncAA by the O-RS. In addition, the orthogonal pair functions in the translation system of interest (e.g, the cell) such that the O-tRNA^{ncAA} is used to incorporate the ncAA residue into the growing polypeptide chain of a POI. Incorporation occurs in a site specific manner. Specifically, the O-tRNA^{ncAA} recognizes a selector codon (e.g., an Amber, Ochre or Opal stop codon) in the mRNA coding for the POI.

[0297] The term “preferentially aminoacylates” refers to an efficiency of, e.g., about 50% efficient, about 70% efficient, about 75% efficient, about 85% efficient, about 90% efficient, about 95% efficient, or about 99% or more efficient, at which an O-RS aminoacylates an O-tRNA with an unnatural amino acid compared to an endogenous tRNA or amino acid of a translation system of interest (e.g., a cell). The unnatural amino acid is then incorporated into a growing polypeptide chain with high fidelity, e.g., at greater than about 75% efficiency for a given selector codon, at greater than about 80% efficiency for a given selector codon, at greater than about 90% efficiency for a given selector codon, at greater than about 95% efficiency for a given selector codon, or at greater than about 99% or more efficiency for a given selector codon.

[0298] tRNAs which can be used for being aminoacylated by a fusion protein of the present invention comprising at least one O-RS segment derived from a M. mazei pyrrolysyl tRNA synthetase include, but are not limited to pyrrolysyl tRNA of M. mazei and functional mutants thereof wherein the anticodon is the anticodon to a selector codon such as, e.g., the CUA anticodon to the Amber stop codon TAG, the anticodon UCA to the Opal stop codon TGA, and the anticodon UUA to the Ochre stop codon TAA. Examples for such pyrrolysyl tRNAs include, but are not limited to, those encoded by the nucleotide sequence of SEQ ID NO:4 (tRNA^{Pyl,CUA}), SEQ ID NO:5 (tRNA^{Pyl,UCA}) or SEQ ID NO:6 (tRNA^{Pyl,UUA}). Non-limiting examples of further suitable tRNAs are the following ones derived from pyrrolysyl tRNA of M. mazei:

[0299] tRNA^{pyl,CGA} Pyrrolysyl tRNA (for Serine codon), SEQ ID NO: 229

[0300] tRNA^{pyl,CGG} Pyrrolysyl tRNA (for Proline codon), SEQ ID NO: 230

[0301] tRNA^{pyl,UAA} Pyrrolysyl tRNA (for Leucine codon), SEQ ID NO: 231

[0302] tRNA^{pyl,UAG} Pyrrolysyl tRNA (for Leucine codon), SEQ ID NO: 232

[0303] tRNA^{pyl,CCG} Pyrrolysyl tRNA (for Arginine codon), SEQ ID NO: 233

[0304] tRNA^{pyl,AUA} Pyrrolysyl tRNA (for Isoleucine codon), SEQ ID NO: 234

[0305] The term “selector codon” as used herein refers to a codon that is recognized (i.e. bound) by the O-tRNA^{ncAA} in the translation process. The term is also used for the corresponding codons in polypeptide-encoding sequences of polynucleotides which are not messenger RNAs (mRNAs), e.g. DNA plasmids. The new OT systems described herein allow for orthogonal translation of POIs in a manner that is selective for the mRNA of said POIs compared to other mRNAs present in the cytoplasm of the cell. Nevertheless, it is preferable that the selector codon is a codon of low abundance in the cell chosen for expression, for example a codon of low abundance in naturally occurring eukaryotic cells. The new OT systems bring the mRNA of the POIs, the O-RS and the tRNA^{ncAA} into proximity to one another, thus supporting the introduction of the ncAA (rather than the introduction of an amino acid of a different tRNA that might potentially bind to the selector codon) at the selector codon-encoded amino acid position of the POI. Thus, the selector codon can be a sense codon. Nevertheless, in preferred embodiments, the selector codon is a codon that is not recognized by endogenous tRNAs of the cell used for preparing the POI.

[0306] The anticodon of the O-tRNA^{ncAA} binds to a selector codon within an mRNA (the mRNA of the POI) and thus incorporates the ncAA site-specifically into the growing chain of the polypeptide (POI) encoded by said mRNA. Examples for selector codons which are useful in the new OT systems described herein include, but are not limited to:
[0307] nonsense codons, such as stop codons, e.g., Amber (UAG), Ochre (UAA), and Opal (UGA) codons;
[0308] codons consisting of more than three bases (e.g., four base codons);
[0309] codons derived from natural or unnatural base pairs; and
[0310] sense codons.

[0311] Where a selector codon is used that is a sense codon (i.e., a natural three base codon), it is preferable that the endogenous translation system of the cell used for POI expression according to a method of the present invention does not (or only scarcely) use said natural three base codon, e.g., a cell that is lacking, or has a reduced abundance of, a tRNA that recognizes the natural three base codon or a cell wherein the natural three base codon is a rare codon. The use of one or more stop codons, such as one or more of Amber, Ochre and Opal, as selector codons in the present invention is particularly preferred.

[0312] A number of selector codons can be introduced into a polynucleotide encoding a desired polypeptide (target polypeptide, POI), e.g., one or more, two or more, more than three, etc. selector codons. A POI can carry two or more ncAA residues. Said ncAA residues can be the same and encoded by the same type of selector codon, or can be different and encoded by different selector codons.

[0313] An anticodon has the reverse complement sequence of the corresponding codon.

[0314] A suppressor tRNA is a tRNA (such as an O-tRNA^{ncAA}) that alters the reading of a messenger RNA (mRNA) in a given translation system (e.g., a cell). A suppressor tRNA can read through, e.g., a stop codon, a four base codon, or a rare codon.

[0315] The O-tRNA is preferentially aminoacylated by O-RS (rather than endogenous synthetases) and is capable of decoding a selector codon, as described herein. The O-RS recognizes the O-tRNA, e.g., with an extended anticodon loop, and preferentially aminoacylates the O-tRNA with an ncAA.

[0316] The O-tRNA and the O-RS used in the methods and/or fusion proteins of the invention can be naturally occurring or can be derived by mutation of a naturally occurring tRNA and/or RS from a variety of organisms. In various embodiments, the tRNA and RS are derived from at least one organism. In another embodiment, the tRNA is derived from a naturally occurring or mutated naturally occurring tRNA from a first organism and the RS is derived from naturally occurring or mutated naturally occurring RS from a second organism.

[0317] A suitable (orthogonal) tRNA/RS pair may be selected from libraries of mutant tRNA and RS, e.g. based on the results of a library screening. Alternatively, a suitable tRNA/RS pair may be a heterologous tRNA/synthetase pair that is imported from a source species into the translation system. Preferably, the cell used as translation system is different from said source species. Methods for evolving tRNA/RS pairs are described, e.g., in WO 02/085923 and WO 02/06075.

[0318] Conventional site-directed mutagenesis can be used to introduce selector codons into the coding sequence of a POI.

[0319] 4. Nucleic Acid Molecules

[0320] The invention also relates to nucleic acid molecules (single-stranded or double-stranded DNA and RNA sequences, for example cDNA, mRNA), or combinations of such nucleic acid molecules, comprising a nucleotide sequence that encodes for at least one of the fusion proteins of the present invention, and/or a nucleotide sequence complementary thereto.

[0321] Further, the invention relates to nucleic acid molecules (single-stranded or double-stranded DNA and RNA sequences, for example cDNA, mRNA), or combinations of such nucleic acid molecules, comprising (i) a nucleotide sequences (CS^{POI}) that encodes at least one POI, said POI comprising one or more ncAA residues which are encoded in the CS^{POI} by selector codons, and (ii) a targeting nucleotide sequence (TN) as described herein, wherein an RNA molecule comprising (the RNA version of) said TN is able to interact via said TN with an RNA-targeting polypeptide (RNA-TP).

[0322] The nucleic acid molecules of the invention can in addition contain untranslated sequences of the 3′- and/or 5′-end of the coding gene region. The TN is preferably located at the 3′ end of the nucleic acid molecule encoding the POI(s). For example, nucleic acid molecules of the invention encoding the POI(s) can be prepared by introducing at least one TN at (in particular 3′ of) the 3′ untranslated region using common cloning techniques known in the art.

[0323] The nucleic acid molecules of the invention can in addition contain untranslated sequences of the 3′- and/or 5-end of the coding gene region.

[0324] The invention further relates to, in particular recombinant, expression constructs or expression cassettes, containing, under the genetic control of regulatory nucleic acid sequences the nucleic acid sequence of the nucleic acid molecule, or combination of nucleic acid molecules, of the invention as described herein. The expression cassettes of the invention thus comprise the nucleic acid sequence coding for at least one POI (plus TN) or at least one fusion protein of the invention, and/or a nucleic acid sequence complementary thereto. The invention also relates to, in particular recombinant, vectors, comprising at least one of these expression constructs (expression vectors).

[0325] An expression cassette typically comprises a promoter sequence that is located 5′ (upstream) of, and functionally linked with, the nucleic acid sequence encoding the to-be-expressed POI(s) or fusion protein(s), a terminator sequence 3′ (downstream) of said encoding sequence and optionally further regulatory elements. Examples of such further regulatory elements include, but are not limited to, targeting sequences, enhancers, polyadenylation signals, selectable markers, amplification signals, replication origins and the like. Suitable regulatory sequences are described for example in Goeddel, Gene Expression Technology: Methods in Enzymology 185, Academic Press, San Diego, Calif. (1990).

[0326] In addition to these regulatory sequences, the natural regulation of these sequences can still be present before the actual structural genes and optionally can have been genetically altered, so that the natural regulation has been switched off and expression of the genes has been increased. The nucleic acid construct can, however, also be of simpler construction, i.e. no additional regulatory signals have been inserted before the coding sequence and the natural promoter, with its regulation, has not been removed. Instead, the natural regulatory sequence is mutated so that regulation no longer takes place and gene expression is increased.

[0327] A “functional” linkage of elements of nucleic acid molecules, such as promotor, polypeptide-encoding sequence, terminator, regulators, means that these elements are arranged such that the encoding sequence can be transcribed and the optional regulatory elements can perform their regulation of said transcription. This can be achieved by a direct linkage of the elements in one and the same nucleic acid molecule. However, such direct linkage is not necessarily required. Genetic control sequences, for example enhancer sequences, can even exert their function on the target sequence from more remote positions or even from other DNA molecules. Arrangements are preferred in which the nucleic acid sequence to be transcribed is positioned downstream (i.e. at the 3′-end of) the promoter sequence, so that the two sequences are joined together covalently. The distance between the promoter sequence and the nucleic acid sequence to be expressed can be smaller than 200 base pairs, or smaller than 100 base pairs or smaller than 50 base pairs.

[0328] For expression in a cell, the expression cassette is advantageously inserted into an expression vector. Expression vectors are chosen according to the cell to be used for expression which makes optimal expression of the encoding nucleotide sequences in the cell possible. Vectors are well known by a person skilled in the art and are given for example in “Cloning vectors” (Pouwels P. H. et al., Ed., Elsevier, Amsterdam-New York-Oxford, 1985). Examples of expression vectors include, but are not limited to, plasmids, viral vectors (phages), e.g. SV40, CMV, baculovirus and adenovirus, transposons, IS elements, phasmids, cosmids, and linear or circular DNA. See, e.g., the book “Cloning Vectors” (Eds. Pouwels P. H. et al. Elsevier, Amsterdam-New York-Oxford, 1985, ISBN 0 444 904018). These vectors can be replicated autonomously in the (host) cell or can be replicated chromosomally. Expression vectors comprising at least one expression cassette of the present invention represent a further aspect of the invention.

[0329] For the expression of a POI in a cell according to the present invention, it is possible, e.g., to introduce a nucleic acid molecule which encodes the POI (e.g. an expression vector of the invention) into the cell. Alternatively, an existing gene of the cell can be modified so as to comprise selector codons at those amino acid positions where the POI is intended to carry ncAA residues. Methods for introducing (recombinant) polypeptide-encoding nucleic acid molecules into, or for modifying existing genes of, a cell are known in the art.

[0330] The term “expression” describes, in the context of the invention, the production of polypeptides encoded by the corresponding nucleic acid sequence in a cell. The term “expression” is also used for the production of tRNA molecules encoded by nucleic acid sequences in the cell.

[0331] The nucleic acid molecules of the invention, including the expression cassettes and expression vectors of the invention can be prepared using common cloning techniques known in the art. Common recombination and cloning techniques are used, as described for example in T. Maniatis, E. F. Fritsch and J. Sambrook, Molecular Cloning: A Laboratory Manual, Cold Spring Harbor Laboratory, Cold Spring Harbor, N.Y. (1989) and in T. J. Silhavy, M. L. Berman and L. W. Enquist, Experiments with Gene Fusions, Cold Spring Harbor Laboratory, Cold Spring Harbor, N.Y. (1984) and in Ausubel, F. M. et al., Current Protocols in Molecular Biology, Greene Publishing Assoc. and Wiley Interscience (1987).

[0332] The nucleic acid molecules, or combinations of nucleic acid molecules, of the invention, including expression cassettes and expression vectors of the invention, can be isolated, for example by methods known in the art.

[0333] An “isolated” nucleic acid molecule is separated from other nucleic acid molecules that are present in the natural source of the nucleic acid, and moreover can be essentially free of other cellular material or culture medium, when it is produced by recombinant techniques, or free of chemical precursors or other chemicals, when it is chemically synthesized.

[0334] A nucleic acid molecule according to the invention can be isolated by standard techniques of molecular biology and the sequence information provided according to the invention. For example, cDNA can be isolated from a suitable cDNA-bank, using one of the concretely disclosed complete sequences or a segment thereof as hybridization probe and standard hybridization techniques (as described for example in Sambrook, J., Fritsch, E. F. and Maniatis, T. Molecular Cloning: A Laboratory Manual. 2nd edition, Cold Spring Harbor Laboratory, Cold Spring Harbor Laboratory Press, Cold Spring Harbor, N.Y., 1989). Moreover, a nucleic acid molecule, comprising one of the disclosed sequences or a segment thereof, can be isolated by polymerase chain reaction, using the oligonucleotide primers that were constructed on the basis of this sequence. The nucleic acid thus amplified can be cloned into a suitable vector and can be characterized by DNA sequence analysis. The oligonucleotides according to the invention can moreover be produced by standard methods of synthesis, e.g. with an automatic DNA synthesizer.

[0335] 5. ncAAs and Post-Translational POI Modifications

[0336] The abbreviation “ncAA” refers generally to any non-canonical or non-natural amino acid, or amino acid residue, that is not among the 22 naturally occurring proteinogenic amino acids. Numerous ncAAs are well known in the art (see, e.g., Liu et al., Annu Rev Biochem 2010, 79:413-444; Lemke, ChemBioChem 2014, 15:1691-1694). The term “ncAA” also refers to amino acid derivatives, for example α-hydroxy acids (rather than α-amino acids). Such derivatives have been shown to be translationally incorporable as well. See, e.g., Ohta et al., 2008, ChemBioChem 9:2773-2778. Accordingly, the meaning of terms such as “aminoacylate” or “aminoacylation” used herein is not limited to the RS-catalyzed linkage of a tRNA and an α-amino acid but also includes the RS-catalyzed linkage of a tRNA and a ncAA derivative such as an α-hydroxy acid.

[0337] Particular preferred ncAAs for use in the present invention are those which can be post-translationally further modified, for example using click chemistry reactions. Such click reactions include strain-promoted inverse-electron-demand Diels-Alder cycloadditions (SPIEDAC; see, e.g., Devaraj et al., Angew Chem Int Ed Engl 2009, 48:7013)) as well as cycloadditions between strained cycloalkynyl groups, or strained cycloalkynyl analog groups having one or more of the ring atoms not bound by the triple bond substituted by amino groups), with azides, nitrile oxides, nitrones and diazocarbonyl reagents (see, e.g., Sanders et al., J Am Chem Soc 2010, 133:949; Agard et al., J Am Chem Soc 2004, 126:15046), for example strain promoted alkyne-azide cycloadditions (SPAAC). Such click reactions allow for ultrafast and biorthogonal covalent site-specific coupling of ncAA-labeling groups of target polypeptides with suitable groups of coupling partner molecule. Pairs of docking and labeling groups which can react via the above-mentioned click reactions are known in the art. Examples of suitable ncAAs for use in the present invention comprising docking groups include, but are not limited to, the ncAAs (“unnatural amino acids”, “UAAs”) described, e.g., in WO 2012/104422 and WO 2015/107064. Optionally substituted strained alkynyl groups include, but are not limited to, optionally substituted trans-cyclooctenyl groups, such as those described in. Optionally substituted strained alkenyl groups include, but are not limited to, optionally substituted cyclooctynyl groups, such as those described in WO 2012/104422 and WO 2015/107064. Optionally substituted tetrazinyl groups include, but are not limited to, those described in WO 2012/104422 and WO 2015/107064.

[0338] The ncAAs used in the context of the present invention can be used in the form of their salt. Salts of an ncAA as described herein means acid or base addition salts, especially addition salts with physiologically tolerated acids or bases. Physiologically tolerated acid addition salts can be formed by treatment of the base form of an ncAA with appropriate organic or inorganic acids. ncAAs containing an acidic proton may be converted into their non-toxic metal or amine addition salt forms by treatment with appropriate organic and inorganic bases. Salts of carboxyl groups of ncAAs can be produced in a manner known in the art and comprise inorganic salts, for example sodium, calcium, ammonium, iron and zinc salts, and salts with organic bases, for example amines, such as triethanolamine, arginine, lysine, piperidine, etc. ncAAs may also be used in the form of salts of acid addition, for example salts with mineral acids, such as hydrochloric acid or sulfuric acid and salts with organic acids, such as acetic acid and oxalic acid. The ncAAs and salts thereof which are useful in the present invention also comprise the hydrates and solvent addition forms thereof, e.g. hydrates, alcoholates and the like.

[0339] Physiologically tolerated acids or bases are in particular those which are tolerated by the translation system used for preparation of POI with ncAA residues, e.g. are substantially non-toxic to living eukaryotic cells.

[0340] ncAAs, and salts thereof, useful in the context of the present the invention can be prepared by analogy to methods which are well known in the art and are described, e.g., in the various publications cited herein.

[0341] The nature of the coupling partner molecule depends on the intended use. For example, the target polypeptide may be coupled to a molecule suitable for imaging methods or may be functionalized by coupling to a bioactive molecule. For instance, in addition to the docking group, a coupling partner molecule may comprise a group selected from, but not limited to, dyes (e.g. fluorescent, luminescent, or phosphorescent dyes, such as dansyl, coumarin, fluorescein, acridine, rhodamine, silicon-rhodamine, BODIPY, or cyanine dyes), molecules able to emit fluorescence upon contact with a reagent, chromophores (e.g., phytochrome, phycobilin, bilirubin, etc.), radiolabels (e.g. radioactive forms of hydrogen, fluorine, carbon, phosphorous, sulphur, or iodine, such as tritium, ¹⁸F, ¹¹C, ¹⁴C, ³²P, ³³P, ³³S, ³⁵S, ¹¹In, ¹²⁵I, ¹²³I, ¹³¹I, ²¹²B, ⁹⁰Y or ¹⁸⁶Rh), MRI-sensitive spin labels, affinity tags (e.g. biotin, His-tag, Flag-tag, strep-tag, sugars, lipids, sterols, PEG-linkers, benzylguanines, benzylcytosines, or co-factors), polyethylene glycol groups (e.g., a branched PEG, a linear PEG, PEGs of different molecular weights, etc.), photocrosslinkers (such as p-azidoiodoacetanilide), NMR probes, X-ray probes, pH probes, IR probes, resins, solid supports and bioactive compounds (e.g. synthetic drugs). Suitable bioactive compounds include, but are not limited to, cytotoxic compounds (e.g., cancer chemotherapeutic compounds), antiviral compounds, biological response modifiers (e.g., hormones, chemokines, cytokines, interleukins, etc.), microtubule affecting agents, hormone modulators, and steroidal compounds. Specific examples of useful coupling partner molecules include, but are not limited to, a member of a receptor/ligand pair; a member of an antibody/antigen pair; a member of a lectin/carbohydrate pair; a member of an enzyme/substrate pair; biotin/avidin; biotin/streptavidin and digoxin/antidigoxin.

[0342] The ability of certain (labeling groups of) ncAA residues to be coupled covalently in situ to (the docking groups of) conjugation partner molecules, in particular by a click reaction as described herein, can be used for detecting a target polypeptide having such ncAA residue(s) within a eukaryotic cell or tissue expressing the target polypeptide, and for studying the distribution and fate of the target polypeptides. Specifically, the method of the present invention for preparing a POI by expression in (e.g., eukaryotic) cells can be combined with super-resolution microscopy (SRM) to detect the POI within the cell or a tissue of such cells. Several SRM methods are known in the art and can be adapted so as to utilize click chemistry for detecting a target polypeptide expressed by a eukaryotic cell of the present invention. Specific examples of such SRM methods include DNA-PAINT (DNA point accumulation for imaging in nanoscale topography; described, e.g., by Jungmann et al., Nat Methods 11:313-318, 2014), dSTORM (direct stochastic optical reconstruction microscopy) and STED (stimulated emission depletion) microscopy.

[0343] 6. Translational Preparation of POIs in Cells The OT systems provided by the invention allow for the translational preparation of a POI in a cell.

[0344] The cell used for preparing a POI according to the invention can be a prokaryotic cell. Alternatively, the cell used for preparing a POI according to the invention can be a eukaryotic cell. The cell used for preparing a POI according to the invention can be a separate cell such as, e.g., a single-cell microorganism or a cell line derived from cells of multicellular organisms. Alternatively, the cell used for preparing a POI according to the invention can be present in (and part of) a tissue, an organ, a body part or an entire multicellular organism. Thus, the methods of the invention for preparing a POI can be performed with a separate cell or a cell culture, or with a tissue or tissue culture, organ, body part or (entire multicellular) organism.

[0345] Eukaryotic cells are often more difficult to handle and manipulate compared to prokaryotes such as, e.g., E. coli, and therefore not or only very difficult accessible to known approaches for POI-selective orthogonal translation such as those described in the “Background of the invention” section above. The OT system and the methods of the invention are therefore particular advantageous when use for POI expression in eukaryotic cells (including, e.g., single- and multicellular eukaryotic organisms, and eukaryotic cell lines).

[0346] In principle, all prokaryotic or eukaryotic cells can be used for preparing a POI according to a method of the present invention. Microorganisms such as, e.g., bacteria, fungi or yeasts can be used, as well as eukaryotic cells, such as, e.g., mammalian cells, insect cells, yeast cells and plant cells. Eukaryotic cells and in particular mammalian cells are particularly preferred.

[0347] The cell used for preparing a POI according to the invention carries a POI-encoding nucleotide sequence (CS^{POI}) wherein the ncAA residue(s) of the POI are encoded by selector codon(s). Said CS^{POI} is functionally linked with one or more targeting sequences (TNs). Translation yields an mRNA comprising the CS^{POI} and the TN(s). The cell further comprises one or more fusion proteins of the present invention, wherein said fusion protein(s) comprise at least one O-RS segment and at least one RNA-TP segment. Said O-RS and RNA-TP can be on separate fusion proteins (e.g. AFPs) of the invention. Alternatively, said O-RS and RNA-TP can be on one and the same fusion protein (e.g. on an RNA-TP/O-RS fusion protein or an AFP) of the invention. Via (at least one of) its TN(s) said mRNA can interact with (bind to) at least one of the RNA-TP segments of the fusion proteins of the invention in the cell.

[0348] The cell further comprises one or more orthogonal tRNA^{ncAA} molecules (O-tRNA^{ncAA}) which carry the anticodon(s) to the selector codon(s) of the CS^{POI}. Said O-tRNA^{ncAA} molecules and one or more of the O-RS segments of the fusion proteins in the cell form one or more orthogonal O-RS/O-tRNA^{ncAA} pairs which allow for introducing the ncAA residue(s) into the amino acid sequence of the (translationally prepared) POI.

[0349] The interaction of the mRNA comprising CS^{POI} and TN(s) with the RNA-TP segment(s), the aminoacylation of the O-tRNA^{ncAA} with the ncAAs by the O-RS segment(s), and the translational preparation of the POI including the introduction of the ncAA residue(s) thought to take place in the cytoplasm, more particularly in the OT assembly (OT organelle), of the cell in the presence of the ncAAs.

[0350] The mRNA comprising CS^{POI} and TN(s) (mRNA^{POI}) can be generated from a recombinant construct (e.g. expression vector) introduced into the cell. Alternatively, one or more endogenous genes of the cell can be modified so as to comprise one or more selector codons and one or more TNs. Techniques for introducing recombinant constructs into a cell as well as methods for modifying endogenous genes of a cell are well known in the art.

[0351] The tRNA^{ncAA} molecules and fusion proteins of the invention can be generated from a recombinant construct (e.g. expression vector) introduced into the cell.

[0352] Using expression vectors according to the invention, recombinant cells can be produced which can be used for preparing a POI using a method of the present invention. Advantageously, the recombinant vectors according to the invention, described above, are introduced into a suitable cell and expressed.

[0353] The cell used for preparing a POI as described herein can be prepared by introducing nucleotide sequences encoding the fusion protein(s), the tRNA^{ncAA} molecule(s) and the POI into the cell. Said nucleotide sequences can be located on separate nucleic acid molecules (vectors) or on the same nucleic acid molecule (e.g., vector), in any combination, and can be introduced into the cell in combination or sequentially.

[0354] Preferably common cloning and transfection techniques, known by a person skilled in the art, are used, for example co-precipitation, protoplast fusion, electroporation, virus-mediated gene delivery, lipofection, microinjection or others, for introducing the stated nucleic acid molecules in the respective cell. Suitable techniques are described for example in Current Protocols in Molecular Biology, F. Ausubel et al., Ed., Wiley Interscience, New York 1997, or Sambrook et al. Molecular Cloning: A Laboratory Manual. 2^{nd} edition, Cold Spring Harbor Laboratory, Cold Spring Harbor Laboratory Press, Cold Spring Harbor, N.Y., 1989.

[0355] For the methods of the present invention, the cell used for POI expression is grown or cultured in a manner known by a person skilled in the art. Depending on the type of cell, a liquid medium can be used for culturing. Culture can be batchwise, semi-batchwise or continuous. Nutrients can be present at the beginning of the culturing or can be supplied later, semi-continuously or continuously.

[0356] The expressed POIs can be purified by known techniques, such as, e.g., molecular sieve chromatography (gel filtration), such as Q-sepharose chromatography, ion exchange chromatography and hydrophobic chromatography, and other common protein purification techniques such as ultrafiltration, crystallization, salting-out, dialysis and native gel electrophoresis. Suitable methods are described, for example, in Cooper, T. G., Biochemische Arbeitsmethoden [Biochemical processes], Verlag Walter de Gruyter, Berlin, New York or in Scopes, R., Protein Purification, Springer Verlag, New York, Heidelberg, Berlin.

[0357] For isolating a POI, it can be advantageous to link the POI with a tag that can serve for easier purification. This can be achieved by introducing a corresponding tag-encoding sequence into the CSPOI. Suitable tags for protein purification are well known in the art and include, e.g., histidine tags (e.g., His6 tag (SEQ ID NO: 685)) and epitopes that can be recognized as antigens of antibodies (described for example in Harlow, E. and Lane, D., 1988, Antibodies: A Laboratory Manual. Cold Spring Harbor (N.Y.) Press). These tags can serve for attaching the proteins to a solid carrier, for example a polymer matrix, which can for example be used as packing in a chromatography column, or can be used on a microtiter plate or on some other carrier.

[0358] A tag linked to a POI can also serve for detecting the POI. Tags for protein detection are well known in the art and include, e.g., fluorescent dyes, enzyme markers, which form a detectable reaction product after reaction with a substrate, and others.

[0359] For preparing a POI according to a method of the present invention, the expression can be achieved by culturing the cell in the presence of one or more ncAAs corresponding to the ncAA residue(s) of the POI (wherein said ncAAs may expediently be comprised in the culture medium) for a time suitable to allow translation of the POI. Depending on the nucleic acid(s) encoding the POI (and optionally the fusion proteins of the invention and/or the tRNA^{ncAA} molecules), it may be required to induce expression by adding a compound inducing transcription, such as, e.g., arabinose, isopropyl #-D-thiogalactoside (IPTG) or tetracycline that allows transcription.

[0360] After translation, the POI may optionally be recovered from the translation system. For this purpose, the POI can be recovered and purified, either partially or substantially to homogeneity, according to procedures known to and used by those of skill in the art. Unless the target polypeptide is secreted into the culture medium, recovery usually requires cell disruption. Methods of cell disruption are well known in the art and include physical disruption, e.g., by (ultrasound) sonication, liquid-sheer disruption (e.g., via French press), mechanical methods (such as those utilizing blenders or grinders) or freeze-thaw cycling, as well as chemical lysis using agents which disrupt lipid-lipid, protein-protein and/or protein-lipid interactions (such as detergents), and combinations of physical disruption techniques and chemical lysis. Standard procedures for purifying polypeptides from cell lysates or culture media are also well known in the art and include, e.g., ammonium sulfate or ethanol precipitation, acid or base extraction, column chromatography, affinity column chromatography, anion or cation exchange chromatography, phosphocellulose chromatography, hydrophobic interaction chromatography, hydroxylapatite chromatography, lectin chromatography, gel electrophoresis and the like. Protein refolding steps can be used, as desired, in making correctly folded mature proteins. High performance liquid chromatography (HPLC), affinity chromatography or other suitable methods can be employed in final purification steps where high purity is desired. Antibodies made against the polypeptides of the invention can be used as purification reagents, i.e. for affinity-based purification of the polypeptides. A variety of purification/protein folding methods are well known in the art, including, e.g., those set forth in Scopes, Protein Purification, Springer, Berlin (1993); and Deutscher, Methods in Enzymology Vol. 182: Guide to Protein Purification, Academic Press (1990); and the references cited therein.

[0361] As noted, those of skill in the art will recognize that, after synthesis, expression and/or purification, polypeptides can possess a conformation different from the desired conformations of the relevant polypeptides. For example, polypeptides produced by prokaryotic systems often are optimized by exposure to chaotropic agents to achieve proper folding. During purification from, e.g., cell lysates, the expressed polypeptide is optionally denatured and then renatured. This is accomplished, e.g., by solubilizing the proteins in a chaotropic agent such as guanidine HCl. In general, it is occasionally desirable to denature and reduce expressed polypeptides and then to cause the polypeptides to re-fold into the preferred conformation. For example, guanidine, urea, DTT, DTE, and/or a chaperonin can be added to a translation product of interest. Methods of reducing, denaturing and renaturing proteins are well known to those of skill in the art. Polypeptides can be refolded in a redox buffer containing, e.g., oxidized glutathione and L-arginine.

[0362] Also described are polypeptides produced by the methods of the invention. Such polypeptides can be prepared by a method of the invention that makes use of the OT system described herein.

[0363] 7. Kits

[0364] The present invention also provides kits for preparing a POI having at least one non-canonical amino acid (ncAA) residue. The kit of the invention may comprise at least one expression vector for at least one fusion protein of the present invention. The fusion protein(s) encoded by the expression vector(s) in the kit may comprise at least one O-RS segment and at least one RNA-TP segment. The kit may further comprise at least one ncAA, or salt thereof, corresponding to the at least one ncAA residue of the POI. Expediently said O-RS segment is capable of aminoacylating a tRNA with the at least one ncAA. The kit may further comprise at least one expression vector for an orthogonal tRNA^{ncAA} (O-tRNA^{ncAA}) molecule. Further components of the kit may include at least one expression vector comprising a multiple cloning site and a targeting nucleotide sequence (TN), wherein an RNA molecule comprising said TN is able to interact via said TN with an RNA-targeting polypeptide (RNA-TP). Expediently said TN is a sequence, which, when present in an RNA molecule, is able to interact with an RNA-TP segment of at least one of the fusion protein(s) encoded by the expression vector(s) comprised by the kit. The kit may further comprise at least one reporter construct encoding an easily detectable (e.g. fluorescent) reporter polypeptide having at least one non-canonical amino acid (ncAA) residue such that the mRNA translated from said construct comprises a TN as described herein.

[0365] The kits of the present invention can be used in methods of the invention for preparing ncAA-residue containing POIs as described herein.

### PARTICULAR EMBODIMENTS

[0366] The present invention further provides the following non-limiting embodiments E1 to E50.
[0367] E1: An assembler fusion protein (AFP) comprising:
   [0368] (a) at least one first polypeptide segment acting as assembler (AP) that is selected from:
      [0369] (a1) a polypeptide segment derived from an intracellular targeting polypeptide (IC-TP segment), wherein said intracellular targeting polypeptide targets, and thus becomes locally enriched at, an intracellular structural element within or directly adjacent to the cytoplasm; and
      [0370] (a2) a polypeptide segment derived from a phase separation polypeptide (PSP segment), wherein said phase separation polypeptide has the ability to undergo self-association in the cytoplasm of a cell so as to create sites of high local concentration in the cytoplasm, and
   [0371] (b) at least one second polypeptide segment acting as an effector (EP) that is selected from:
      [0372] b1) an RNA-targeting polypeptide (RNA-TP) segment, and
      [0373] b2) an orthogonal aminoacyl tRNA synthetase (O-RS) segment;
   [0374] wherein said polypeptide segments are functionally linked in said AFP.
[0375] E2: The AFP of E1 comprising at least two APs, preferably at least one IC-TP segment and at least one PSP segment.
[0376] E3: The AFP of E1 or E2 having one of the following structures (from the N-terminus to the C-terminus):
   [0377] [IC-TP]ₘ-[EP]ₒ
   [0378] [EP]ₒ-[IC-TP]ₘ
   [0379] [PSP]ₙ-[EP]ₒ
   [0380] [EP]ₒ-[PSP]ₙ
   [0381] [IC-TP]ₘ-[EP]ₒ-[PSP]ₙ
   [0382] [PSP]ₙ-[EP]ₒ-[IC-TP]ₘ
   [0383] [IC-TP]ₘ-[PSP]ₙ-[EP]ₒ
   [0384] [EP]ₒ-[PSP]ₙ-[IC-TP]ₘ
   [0385] [PSP]ₙ-[IC-TP]ₘ-[EP]ₒ
   [0386] [EP]ₒ-[IC-TP]ₘ-[PSP]ₙ wherein m, n and o, independently of each other, are integers selected from 1, 2, 3, 4
   [0387] or 5, and “-” designates a peptidic linkage.
[0388] E4: The AFP of any one of E1-E3, wherein the at least one EP is selected from RNA-TP segments.
[0389] E5: The AFP of any one of E1-E3, wherein the at least one EP is selected from O-RS segments.
[0390] E6: The AFP of any one of E1-E3 comprising at least one EP selected from RNA-TP segments and at least one EP selected from O-RS segments.
[0391] E7: The AFP of any one of E1-E6 comprising at least one IC-TP segment selected from dyneins and kinesins, and fragments and mutants of dyneins and kinesins, which retain the ability to target, and become enriched at, the plus or the minus end of microtubules.
[0392] E8: The AFP of any one of E1-E6 comprising at least one IC-TP segment selected from transmembrane domains of membrane proteins, and functional fragments and mutants of transmembrane domains which retain the ability to target, and become enriched at, the cytoplasmic side of membranes, in particular membranes selected from the cell membrane, nuclear membrane and mitochondrial membrane.
[0393] E9: The AFP of any one of E1-E8 comprising at least one IC-TP segment selected from:
   [0394] KIF16B₁₋₄₀₀ comprising the amino acid sequence of SEQ ID NO:20, or a functional fragment or mutant thereof having at least 60%, at least 70%, at least 80%, at least 90%, at least 95%, at least 96%, at least 97%, at least 98% or at least 99% amino acid sequence identity to the amino acid sequence of SEQ ID NO:20;
   [0395] KIF13A_{1-411,Δ390} comprising the amino acid sequence of SEQ ID NO:22, or a functional fragment or mutant thereof having at least 60%, at least 70%, at least 80%, at least 90%, at least 95%, at least 96%, at least 97%, at least 98% or at least 99% amino acid sequence identity to the amino acid sequence of SEQ ID NO:22;
   [0396] TOMM20₁₋₇₀ comprising the amino acid sequence of SEQ ID NO:24, or a functional fragment or mutant thereof having at least 60%, at least 70%, at least 80%, at least 90%, at least 95%, at least 96%, at least 97%, at least 98% or at least 99% amino acid sequence identity to the amino acid sequence of SEQ ID NO:24;
   [0397] LcK comprising the amino acid sequence of SEQ ID NO:26, or a functional fragment or mutant thereof having at least 60%, at least 70%, at least 80%, at least 90%, at least 95%, at least 96%, at least 97%, at least 98% or at least 99% amino acid sequence identity to the amino acid sequence of SEQ ID NO:26;
   [0398] FRB-CD28 comprising the amino acid sequence of SEQ ID NO:28, or a functional fragment or mutant thereof having at least 60%, at least 70%, at least 80%, at least 90%, at least 95%, at least 96%, at least 97%, at least 98% or at least 99% amino acid sequence identity to the amino acid sequence of SEQ ID NO:28;
   [0399] FUS-CD28 comprising the amino acid sequence of SEQ ID NO:30, or a functional fragment or mutant thereof having at least 60%, at least 70%, at least 80%, at least 90%, at least 95%, at least 96%, at least 97%, at least 98% or at least 99% amino acid sequence identity to the amino acid sequence of SEQ ID NO:30;
   [0400] EB1 comprising the amino acid sequence of SEQ ID NO:302, or a functional fragment or mutant thereof having at least 60%, at least 70%, at least 80%, at least 90%, at least 95%, at least 96%, at least 97%, at least 98% or at least 99% amino acid sequence identity to the amino acid sequence of SEQ ID NO:303
   [0401] CG1 comprising the amino acid sequence of SEQ ID NO:304, or a functional fragment or mutant thereof having at least 60%, at least 70%, at least 80%, at least 90%, at least 95%, at least 96%, at least 97%, at least 98% or at least 99% amino acid sequence identity to the amino acid sequence of SEQ ID NO:304
   [0402] EBAG9 comprising the amino acid sequence of SEQ ID NO:292 (full length) or a functional fragment or mutant thereof having at least 60%, at least 70%, at least 80%, at least 90%, at least 95%, at least 96%, at least 97%, at least 98% or at least 99% amino acid sequence identity to SEQ ID NO:292; or comprising the first 29 N-terminal amino acid residues of SEQ ID NO:294; or a functional fragment or mutant thereof having at least 60%, at least 70%, at least 80%, at least 90%, at least 95%, at least 96%, at least 97%, at least 98% or at least 99% amino acid sequence identity to SEQ ID NO:294
   [0403] CMP Sia Tr, comprising the amino acid sequence of SEQ ID NO:296, or a functional fragment or mutant thereof having at least 60%, at least 70%, at least 80%, at least 90%, at least 95%, at least 96%, at least 97%, at least 98% or at least 99% amino acid sequence identity to the amino acid sequence of SEQ ID NO:296; and
   [0404] P450 2C1 targeting the cytoplasmic side of the ER membrane or a functional fragment or mutant thereof having at least 60%, at least 70%, at least 80%, at least 90%, at least 95%, at least 96%, at least 97%, at least 98% or at least 99% amino acid sequence identity thereto, in particular a fragment comprising the N-terminal first 27 (SEQ ID NO:298); or first 29 (SEQ ID NO:300) amino acid residues; or a functional fragment or mutant thereof having at least 60%, at least 70%, at least 80%, at least 90%, at least 95%, at least 96%, at least 97%, at least 98% or at least 99% amino acid sequence identity to SEQ ID NO:298 or 300.
[0405] E10: The AFP of any one of E1-E9 comprising at least one PSP segment selected from intrinsically disordered proteins (IDPs), in particular prion-like domains, and functional fragments and mutants of IDPs, or prio-like domains, which retain the ability to undergo self-association in the cytoplasm of a cell so as to create sites of high local concentration in the cytoplasm.
[0406] E11: The AFP of any one of E1-E10 comprising at least one PSP segment selected from:
   [0407] SPD5 comprising the amino acid sequence of SEQ ID NO:32, or a functional fragment or mutant thereof having at least 60%, at least 70%, at least 80%, at least 90%, at least 95%, at least 96%, at least 97%, at least 98% or at least 99% amino acid sequence identity to the amino acid sequence of SEQ ID NO:32;
   [0408] FUS comprising the amino acid sequence of SEQ ID NO:34, or a functional fragment or mutant thereof having at least 60%, at least 70%, at least 80%, at least 90%, at least 95%, at least 96%, at least 97%, at least 98% or at least 99% amino acid sequence identity to the amino acid sequence of SEQ ID NO:34; and
   [0409] EWSR1 comprising the amino acid sequence of SEQ ID NO:36, or a functional fragment or mutant thereof having at least 60%, at least 70%, at least 80%, at least 90%, at least 95%, at least 96%, at least 97%, at least 98% or at least 99% amino acid sequence identity to the amino acid sequence of SEQ ID NO:36.
[0410] E12: The AFP of any one of E1-E11 comprising at least one RNA-TP segment selected from RNA-binding segments of viral coat proteins, and functional fragments and mutants of RNA-binding segments of viral coat proteins which retain the ability to interact specifically with an RNA motif of the virus.
[0411] E13: The AFP of any one of E1-E12 comprising at least one RNA-TP segment selected from:
   [0412] MCP comprising the amino acid sequence of SEQ ID NO:14, or a functional fragment or mutant thereof having at least 60%, at least 70%, at least 80%, at least 90%, at least 95%, at least 96%, at least 97%, at least 98% or at least 99% amino acid sequence identity to the amino acid sequence of SEQ ID NO:14;
   [0413] λ_{N22} comprising the amino acid sequence of SEQ ID NO:16, or a functional fragment or mutant thereof having at least 60%, at least 70%, at least 80%, at least 90%, at least 95%, at least 96%, at least 97%, at least 98% or at least 99% amino acid sequence identity to the amino acid sequence of SEQ ID NO:16; and
   [0414] PCP comprising the amino acid sequence of SEQ ID NO:306, or a functional fragment or mutant thereof having at least 60% at least 70%, at least 80%, at least 90%, at least 95%, at least 96%, at least 97%, at least 98% or at least 99% amino acid sequence identity to the amino acid sequence of SEQ ID NO:306.
[0415] E14: The AFP of any one of E1-E13 comprising at least one O-RS segment selected from:
   [0416] Methanococcus jannaschii tyrosyl-tRNA synthetase;
   [0417] Escherichia coli tyrosyl-tRNA synthetase;
   [0418] Escherichia coli leucyl-tRNA synthetase;
   [0419] Methanosarcina mazei pyrrolysyl-tRNA synthetase;
   [0420] Methanosarcina barkeri pyrrolysyl-tRNA synthetase;
   [0421] Methanosarcina acetivorans pyrrolysyl-tRNA synthetase;
   [0422] Methanosarcina thermophila pyrrolysyl-tRNA synthetase;
   [0423] Methanococcoides burtonii pyrrolysyl-tRNA synthetase;
   [0424] Desulfitobacterium hafniense pyrrolysyl-tRNA synthetase; and
   [0425] and functional fragments and mutants thereof which retain aminoacyl-tRNA synthetase enzymatic activity.
[0426] E15: The AFP of any one of E1-E14 comprising at least one O-RS segment selected from:
   [0427] PylRS^{AF} comprising the amino acid sequence of SEQ ID NO:8, or a functional fragment or mutant thereof having at least 60%, at least 70%, at least 80%, at least 90%, at least 95%, at least 96%, at least 97%, at least 98% or at least 99% amino acid sequence identity to the amino acid sequence of SEQ ID NO:8;
   [0428] PylRS^{AA} comprising the amino acid sequence of SEQ ID NO:10, or a functional fragment or mutant thereof having at least 60%, at least 70%, at least 80%, at least 90%, at least 95%, at least 96%, at least 97%, at least 98% or at least 99% amino acid sequence identity to the amino acid sequence of SEQ ID NO:10;
   [0429] PylRS^{AAAF} comprising the amino acid sequence of SEQ ID NO:12, or a functional fragment or mutant thereof having at least 60%, at least 70%, at least 80%, at least 90%, at least 95%, at least 96%, at least 97%, at least 98% or at least 99% amino acid sequence identity to the amino acid sequence of SEQ ID NO:12;
   [0430] IFRS1 comprising the amino acid sequence of SEQ ID NO:224, or a functional fragment or mutant thereof having at least 60%, at least 70%, at least 80%, at least 90%, at least 95%, at least 96%, at least 97%, at least 98% or at least 99% amino acid sequence identity to the amino acid sequence of SEQ ID NO:224;
   [0431] CbzRS comprising the amino acid sequence of SEQ ID NO:226; or a functional fragment or mutant thereof having at least 60%, at least 70%, at least 80%, at least 90%, at least 95%, at least 96%, at least 97%, at least 98% or at least 99% amino acid sequence identity to the amino acid sequence of SEQ ID NO:226;
   [0432] CpkRS comprising the amino acid sequence of SEQ ID NO:228 or a functional fragment or mutant thereof having at least 60%, at least 70%, at least 80%, at least 90%, at least 95%, at least 96%, at least 97%, at least 98% or at least 99% amino acid sequence identity to the amino acid sequence of SEQ ID NO:228; and
   [0433] OMeRS, comprising the amino acid sequence of SEQ ID NO:236 or a functional fragment or mutant thereof having at least 60%, at least 70%, at least 80%, at least 90%, at least 95%, at least 96%, at least 97%, at least 98% or at least 99% amino acid sequence identity to the amino acid sequence of SEQ ID NO:236.
[0434] E16: An assembler fusion protein (AFP) combination comprising at least two AFPs of any one of E1-E15.
[0435] E17: The AFP combination of E16 comprising at least one first AFP comprising at least one RNA-TP segment, and at least one second AFP comprising at least one O-RS segment.
[0436] E18: A fusion protein (RNA-TP/O-RS fusion protein) comprising:
   [0437] (i) at least one RNA-targeting polypeptide (RNA-TP) segment; and
   [0438] (ii) at least one orthogonal aminoacyl tRNA synthetase (O-RS) segment, wherein said polypeptide segments are functionally linked in said RNA-TP/O-RS fusion protein.
[0439] E19: The RNA-TP/O-RS fusion protein of E18 having one of the following structures (from the N-terminus to the C-terminus):
   [0440] [RNA-TP]ₓ-[O-RS]_{y}
   [0441] [O-RS]_{y}-[RNA-TP]ₓ
   [0442] wherein x and y, independently of each other, are integers selected from 1, 2, 3, 4 and 5; and “-” designates a peptidic linkage.
[0443] E20: The RNA-TP/O-RS fusion protein of E18 or E19 comprising at least one RNA-TP segment selected from RNA-binding segments of viral coat proteins, and functional fragments and mutants of RNA-binding segments of viral coat proteins which retain the ability to interact specifically with an RNA motif of the virus.
[0444] E21: The RNA-TP/O-RS fusion protein of any one of E18-E20 comprising at least one RNA-TP segment selected from:
   [0445] MCP comprising the amino acid sequence of SEQ ID NO:14, or a functional fragment or mutant thereof having at least 60%, at least 70%, at least 80%, at least 90%, at least 95%, at least 96%, at least 97%, at least 98% or at least 99% amino acid sequence identity to the amino acid sequence of SEQ ID NO:14;
   [0446] λ_{N22} comprising the amino acid sequence of SEQ ID NO:16, or a functional fragment or mutant thereof having at least 60%, at least 70%, at least 80%, at least 90%, at least 95%, at least 96%, at least 97%, at least 98% or at least 99% amino acid sequence identity to the amino acid sequence of SEQ ID NO:16; and
   [0447] PCP comprising the amino acid sequence of SEQ ID NO:306, or a functional fragment or mutant thereof having at least 60% at least 70%, at least 80%, at least 90%, at least 95%, at least 96%, at least 97%, at least 98% or at least 99% amino acid sequence identity to the amino acid sequence of SEQ ID NO:306.
[0448] E22: The RNA-TP/O-RS fusion protein of any one of E18-E21 comprising at least one O-RS segment selected from:
   [0449] Methanococcus jannaschii tyrosyl-tRNA synthetase;
   [0450] Escherichia coli tyrosyl-tRNA synthetase;
   [0451] Escherichia coli leucyl-tRNA synthetase;
   [0452] Methanosarcina mazei pyrrolysyl-tRNA synthetase;
   [0453] Methanosarcina barkeri pyrrolysyl-tRNA synthetase;
   [0454] Methanosarcina acetivorans pyrrolysyl-tRNA synthetase;
   [0455] Methanosarcina thermophila pyrrolysyl-tRNA synthetase;
   [0456] Methanococcoides burtonii pyrrolysyl-tRNA synthetase;
   [0457] Desulfitobacterium hafniense pyrrolysyl-tRNA synthetase; and
   [0458] and functional fragments and mutants thereof which retain aminoacyl-tRNA synthetase enzymatic activity.
[0459] E23: The RNA-TP/O-RS fusion protein of any one of E18-E22 comprising at least one O-RS segment selected from:
   [0460] PylRS^{AF} comprising the amino acid sequence of SEQ ID NO:8, or a functional fragment or mutant thereof having at least 60% sequence identity to the amino acid sequence of SEQ ID NO:8;
   [0461] PylRS^{AA} comprising the amino acid sequence of SEQ ID NO:10, or a functional fragment or mutant thereof having at least 60% sequence identity to the amino acid sequence of SEQ ID NO:10;
   [0462] PylRS^{AAAF} comprising the amino acid sequence of SEQ ID NO:12, or a functional fragment or mutant thereof having at least 60% sequence identity to the amino acid sequence of SEQ ID NO:12;
   [0463] IFRS1 comprising the amino acid sequence of SEQ ID NO:224, or a functional fragment or mutant thereof having at least 60%, at least 70%, at least 80%, at least 90%, at least 95%, at least 96%, at least 97%, at least 98% or at least 99% amino acid sequence identity to the amino acid sequence of SEQ ID NO:224;
   [0464] CbzRS comprising the amino acid sequence of SEQ ID NO:226; or a functional fragment or mutant thereof having at least 60%, at least 70%, at least 80%, at least 90%, at least 95%, at least 96%, at least 97%, at least 98% or at least 99% amino acid sequence identity to the amino acid sequence of SEQ ID NO:226;
   [0465] CpkRS comprising the amino acid sequence of SEQ ID NO:228 or a functional fragment or mutant thereof having at least 60%, at least 70%, at least 80%, at least 90%, at least 95%, at least 96%, at least 97%, at least 98% or at least 99% amino acid sequence identity to the amino acid sequence of SEQ ID NO:228; and
   [0466] OMeRS, comprising the amino acid sequence of SEQ ID NO:236 or a functional fragment or mutant thereof having at least 60%, at least 70%, at least 80%, at least 90%, at least 95%, at least 96%, at least 97%, at least 98% or at least 99% amino acid sequence identity to the amino acid sequence of SEQ ID NO:236.
[0467] E24: A nucleic acid molecule, or a combination of two or more nucleic acid molecules, comprising:
   [0468] (i) a nucleotide sequence that encodes at least one AFP of any one of E1-E15, or at least one AFP combination of E16 or E17, or
   [0469] (ii) a nucleic acid sequence complementary to the nucleotide sequence of (i).
   [0470] (iii) both of (i) and (ii).
[0471] E25: A nucleic acid molecule, or a combination of two or more nucleic acid molecules, comprising:
   [0472] (i) a nucleotide sequence that encodes at least one RNA-TP/O-RS fusion protein of any one of E18-E23, or
   [0473] (ii) a nucleic acid sequence complementary to (i), or
   [0474] (iii) both of (i) and (ii).
[0475] E26: An expression cassette comprising the nucleotide sequence of the nucleic acid molecule, or the combination of nucleic acid molecules, of E24 or E25.
[0476] E27: An expression vector comprising at least one expression cassette of E26.
[0477] E28: A cell comprising at least one nucleic acid molecule, or combination of nucleic acid molecules, of E24 or E25, at least one expression cassette of E26, or at least one expression vector of E27.
[0478] E29: The cell of E28 which is a eukaryotic cell.
[0479] E30: The cell of E28 which is a mammalian cell.
[0480] E31: The cell of any one of E28-E30 comprising at least one nucleic acid molecule, or combination of nucleic acid molecules, of E24, or at least one expression cassette comprising the nucleotide sequence of said nucleic acid molecule, or combination of nucleic acid molecules, or at least one expression vector comprising said expression cassette.
[0481] E32: The cell of E31 comprising a nucleotide sequence that encodes, or is complementary to a nucleotide sequence encoding, at least one AFP of any one of E1-E3 and E7-E15 comprising at least one EP selected from RNA-TP segments and at least one EP selected from O-RS segments.
[0482] E33: The cell of E31 comprising a nucleotide sequence that encodes, or is complementary to a nucleotide sequence encoding, at least one AFP of any one of E1-E3 and E7-E15 comprising at least one EP selected from RNA-TP segments, and at least one AFP of any one of E1-E3 and E7-E15 comprising at least one EP selected O-RS segments.
[0483] E34: The cell of any one of E28-E30 comprising at least one nucleic acid molecule, or combination of nucleic acid molecules, of E25, or at least one expression cassette comprising the nucleotide sequence of said nucleic acid molecule, or combination of nucleic acid molecules, or at least one expression vector comprising said expression cassette.
[0484] E35: The cell of any one E28-E34, wherein the cell expresses the at least one AFP, the at least one AFP combination or the at least one RNA-TP/O-RS fusion protein, respectively, that is encoded by the nucleotide sequence of said nucleic acid molecule, or combination of nucleic acid molecules.
[0485] E36: A method for preparing a polypeptide of interest (POI) comprising in its amino acid sequence one or more non-canonical amino acid (ncAA) residues, wherein the method comprises expressing the POI in a cell of any one of E31-E33 in the presence of said one or more ncAAs, wherein the cell comprises:
   [0486] (i) a POI-encoding nucleotide sequence (CS^{POI}) wherein said one or more ncAA residues of the POI are encoded by selector codon(s),
   [0487] (ii) a targeting nucleotide sequence (TN) that is functionally linked to the CS^{POI} and is able to interact with an RNA-TP segment of at least one of the AFPs in the cell;
   [0488] (iii) one or more orthogonal tRNA^{ncAA} (O-tRNA^{ncAA}) molecules which carry the anticodon(s) complementary to the selector codon(s) of the CS^{POI}, and wherein said O-tRNA^{ncAA} molecules together with one or more O-RS segments of at least one of the AFPs in the cell form one or more orthogonal O-RS/O-tRNA^{ncAA} pairs which allow for the introduction of said one or more ncAA residues into the amino acid sequence of the POI;
   [0489] and wherein the method optionally further comprises recovering the expressed POI.
[0490] E37: A method for preparing a polypeptide of interest (POI) comprising in its amino acid sequence one or more non-canonical amino acid (ncAA) residues, wherein the method comprises expressing the POI in a cell of E35 in the presence of said one or more ncAAs, wherein the cell comprises:
   [0491] (i) a POI-encoding nucleotide sequence (CS^{POI}) wherein said one or more ncAA residues of the POI are encoded by selector codon(s),
   [0492] (ii) a targeting nucleotide sequence (TN) that is functionally linked to the CS^{POI} and is able to interact with an RNA-TP segment of at least one of the RNA-TP/O-RS fusion proteins in the cell;
   [0493] (iii) one or more orthogonal tRNA^{ncAA} (O-tRNA^{ncAA}) molecules which carry the anticodon(s) complementary to the selector codon(s) of the CS^{POI}, and wherein said O-tRNA^{ncAA} molecules together with one or more O-RS segments of the RNA-TP/O-RS fusion proteins in the cell form one or more orthogonal O-RS/O-tRNA^{ncAA} pairs which allow for the introduction of said one or more ncAA residues into the amino acid sequence of the POI;
   [0494] and wherein the method optionally further comprises recovering the expressed POI.
[0495] E38: A method for preparing a polypeptide of interest (POI) comprising in its amino acid sequence one or more non-canonical amino acid (ncAA) residues, said method comprising the steps of:
   [0496] (a) expressing in a cell one or more AFPs of any one of E1-E3 and E7-E15 comprising at least one RNA-TP segment and one or more AFPs of any one of E1-E3 and E7-E15 comprising at least one O-RS segment;
   [0497] (b) expressing in said cell one or more orthogonal tRNA^{ncAA} (O-tRNA^{ncAA}) molecules, wherein
      [0498] said orthogonal tRNA^{ncAA} molecules and one or more of the O-RS segments of the AFPs in the cell form one or more orthogonal aminoacyl tRNA synthetase/tRNA^{ncAA} (O-RS/O-tRNA^{ncAA}) pairs,
      [0499] said O-RS/O-tRNA^{ncAA} pairs allow for introducing said one or more ncAA residues into the amino acid sequence of said POI,
   [0500] wherein steps (a) and (b) can be concomitantly or sequentially in any order;
   [0501] (c) then, expressing said POI in said cell in the presence of said one or more ncAAs, wherein
      [0502] the POI-encoding nucleotide sequence (CS^{POI}) comprises one or more selector codons encoding said one or more ncAA residues,
      [0503] said selector codons match the anticodons of said one or more O-tRNA^{ncAA} molecules;
      [0504] said CS^{POI} is functionally linked to a targeting nucleotide sequence (TN), thus forming a CS^{POI}/TN fusion sequence,
      [0505] said CS^{POI}/TN fusion sequence is able to interact, via its TN, with an RNA-TP segment of at least one of the AFPs in the cell;
   [0506] and
   [0507] (d) optionally recovering the expressed POI.
[0508] E39: A method for preparing a polypeptide of interest (POI) comprising in its amino acid sequence one or more non-canonical amino acid (ncAA) residues, said method comprising the steps of:
   [0509] (a) expressing in a cell RNA-TP/O-RS fusion proteins of any one of E18-E23; (b) expressing in said cell one or more orthogonal tRNA^{ncAA} (O-tRNA^{ncAA}) molecules, wherein
      [0510] said orthogonal tRNA^{ncAA} molecules and one or more of the O-RS segments of the RNA-TP/O-RS fusion proteins in the cell form one or more orthogonal aminoacyl tRNA synthetase/tRNA^{ncAA} (O-RS/O-tRNA^{ncAA}) pairs,
      [0511] said O-RS/O-tRNA^{ncAA} pairs allow for introducing said one or more ncAA residues into the amino acid sequence of said POI,
   [0512] wherein steps (a) and (b) can be concomitantly or sequentially in any order;
   [0513] (c) then, expressing said POI in said cell in the presence of said one or more ncAAs, wherein
      [0514] the POI-encoding nucleotide sequence (CS^{POI}) comprises one or more selector codons encoding said one or more ncAA residues,
      [0515] said selector codons match the anticodons of said one or more O-tRNA^{ncAA} molecules;
      [0516] said CS^{POI} is functionally linked to a targeting nucleotide sequence (TN), thus forming a CS^{POI}/TN fusion sequence,
      [0517] said CS^{POI}/TN fusion sequence is able to interact, via its TN, with an RNA-TP segment of at least one of the RNA-TP/O-RS fusion proteins in the cell;
   [0518] and
   [0519] (d) optionally recovering the expressed POI.
[0520] E40: The method of any one of E36-E39, wherein the TN is selected from viral RNA motifs bound by a viral coat protein, and functional fragments and mutants thereof which retain the ability to be bound by a viral coat protein.
[0521] E41: The method of any one of E36-E40, wherein the TN is selected from:
   [0522] MS2 RNA stem-loop comprising the RNA sequence encoded by the nucleotide sequence of SEQ ID NO:17, or a functional fragment or mutant thereof having at least 60%, at least 70%, at least 80%, at least 90%, at least 95%, at least 96%, at least 97%, at least 98% or at least 99% amino acid sequence identity to the amino acid sequence of SEQ ID NO:17;
   [0523] BoxB comprising the RNA sequence encoded by the nucleotide sequence of SEQ ID NO:18, or a functional fragment or mutant thereof having at least 60%, at least 70%, at least 80%, at least 90%, at least 95%, at least 96%, at least 97%, at least 98% or at least 99% amino acid sequence identity to the amino acid sequence of SEQ ID NO:18, and
   [0524] pp7 RNA stem-loop existing in at least two different versions and comprising the RNA sequence encoded by the nucleotide sequence of in particular a polynucleotide having an RNA sequence corresponding to (encoded by) the nucleotide (DNA) sequence of SEQ ID NO:289 or SEQ ID NO:290 or a functional fragment or mutant thereof having at least 60%, at least 70%, at least 80%, at least 90%, at least 95%, at least 96%, at least 97%, at least 98% or at least 99% amino acid sequence identity to the amino acid sequence of SEQ ID NO:289 or 290.
[0525] E42: The method of any one of E36-E41, wherein the selector codon(s) encoding the ncAA residue(s) of the POI are selected from Amber, Ochre and Opal stop codons.
[0526] E43: A nucleic acid molecule comprising:
   [0527] (i) a nucleotide sequence (CS^{POI}) that encodes a polypeptide of interest (POI), said POI comprising one or more non-canonical amino acid (ncAA) residues which are encoded in the CS^{POI} by selector codons, and
   [0528] (ii) a targeting nucleotide sequence (TN), wherein an RNA molecule comprising said TN is able to interact via said TN with an RNA-targeting polypeptide (RNA-TP).
[0529] E44: The nucleic acid molecule of E43, wherein the TN is selected from viral RNA motifs bound by a viral coat protein, and functional fragments and mutants thereof which retain the ability to be bound by a viral coat protein.
[0530] E45: The nucleic acid molecule of E43 or E44, wherein the TN is selected from:
   [0531] MS2 RNA stem-loop comprising the RNA sequence encoded by the nucleotide sequence of SEQ ID NO:17, or a functional fragment or mutant thereof having at least 60%,%, at least 70%, at least 80%, at least 90%, at least 95%, at least 96%, at least 97%, at least 98% or at least 99% amino acid sequence identity to the amino acid sequence of SEQ ID NO:17;
   [0532] BoxB comprising the RNA sequence encoded by the nucleotide sequence of SEQ ID NO:18, or a functional fragment or mutant thereof having at least 60%, %, at least 70%, at least 80%, at least 90%, at least 95%, at least 96%, at least 97%, at least 98% or at least 99% amino acid sequence identity to the amino acid sequence of SEQ ID NO:18; and
   [0533] pp7 RNA stem-loop existing in at least two different versions and comprising the RNA sequence encoded by the nucleotide sequence of in particular a polynucleotide having an RNA sequence corresponding to (encoded by) the nucleotide (DNA) sequence of SEQ ID NO:289 or SEQ ID NO:290 or a functional fragment or mutant thereof having at least 60%, at least 70%, at least 80%, at least 90%, at least 95%, at least 96%, at least 97%, at least 98% or at least 99% amino acid sequence identity to the amino acid sequence of SEQ ID NO:289 or 290.
[0534] E46: The nucleic acid molecule of any one of E43-E45, wherein the selector codon(s) encoding the ncAA residue(s) of the POI are selected from Amber, Ochre and Opal stop codons.
[0535] E47: A kit for preparing a polypeptide of interest (POI) having at least one non-canonical amino acid (ncAA) residue, the kit comprising:
   [0536] at least one ncAA, or salt thereof, corresponding to the at least one ncAA residue of the POI, and
   [0537] at least one expression vector of E27.
[0538] E48: The kit of E47, wherein the expression vector encodes a fusion protein comprising at least one O-RS segment and at least one RNA-TP segment.
[0539] E49: The kit of E47 or E48 further comprising at least one expression vector for an orthogonal tRNA^{ncAA} (O-tRNA^{ncAA}) molecule.
[0540] E50: The kit of any one of E47-E49 further comprising at least one expression vector comprising a multiple cloning site and a targeting nucleotide sequence (TN), wherein an RNA molecule comprising said TN is able to interact via said TN with an RNA-targeting polypeptide (RNA-TP).
   [0541] Anyone of the above embodiments also encompass the following modification: The above-mentioned AP (i.e. IC-TP and PSP) segments and/or EP (RNA-TP or O-RS) segments may be further combined with synthetic protein segments, which induce and control macromolecular interactions. One or more, like 2, 3, 4, 5, 6, 7, 8, 9, or 10, preferably one such protein segment may be operably fused into a single AFP of the invention. Of particular interest in the context of the invention are SYNZIPs having the ability to form heterodimeric coiled-coil protein structures. Such SYNZIPs are pairs of synthetic peptides capable of interacting with each other and are used to induce and control macromolecular interactions. Non-limiting examples are the pairs SYNZIP 1:2; SYNZIP 3:4 and SYNZIP 5:6. Particularly preferred according to the invention is the heterospecific coiled-coil pair SYNZIP2:SYNZIP1 as described by Reinke, A. W., Grant, R. A., Keating, A. E. (2010) J Am Chem Soc 132 6025-6031 (SYNZIP 1: SEQ ID NO:312, SYNZIP 2: SEQ ID NO:314, SYNZIP 3: SEQ ID NO:316; SYNZIP 4: SEQ ID NO:318, as well as functional fragments and mutants of these SYNZIP polypeptides. Said functional fragments and mutants may comprise at least 60%, at least 70%, at least 80%, at least 90%, at least 95%, at least 96%, at least 97%, at least 98% or at least 99% amino acid sequence identity to the amino acid of the polypeptide they are derived from.

[0542] The invention is further illustrated by the following non-limiting examples.

### Examples

[0543] Methods

[0544] (A) Cell Culture, Transfections and Feeding with ncAAs

[0545] HEK293T cells (ATCC CRL-3216) and COS-7 cells (ATCC, CRL-1651) were maintained in Dulbecco's modified Eagle's medium (Life Technologies, 41965-039) supplemented with 1% penicillin-streptomycin (Sigma, 10,000 U/ml penicillin, 10 mg/ml streptomycin, 0.9% NaCl), 2 mM L-glutamine (Sigma), 1 mM sodium pyruvate (Life Technologies) and 10% FBS (Sigma). Cells were cultured at 37° C. in a 5% CO₂ atmosphere and passaged every 2-3 days up to 15-20 passages.

[0546] In all cases, cells were seeded 15-20 h prior to transfection at a density resulting in 70-80% confluency at the time of transfection. Flow cytometry was performed using 24-well plates with plastic bottom (Nunclon Delta Surface ThermoScientific). Immunofluorescence labeling and FISH were performed on 24-well plates with glass bottom (Greiner Bio-One) or four-well Lab-Tek #1.0 borosilicate coverglass (ThermoFisher).

[0547] Transfections of HEK293T cells were performed with polyethylenimine (PEI, Sigma-Aldrich) using 3 μg PEI per 1 μg DNA. COS-7 cells were transfected using the JetPrime reagent (PeqLab) according to the manufacturer's recommendations at a ratio of 1:2.

[0548] For Amber suppression system test, cells were transfected at a ratio of a 1:1:1:1 with POI^{TAG} vectors, tRNA^{Pyl}, synthetase and MCP or mock constructs. 4-6 hours after transfection the medium to a fresh containing ncAA.

[0549] Stock and working solutions for all of the used ncAAs were prepared as described in Nikic et al. (Nat Protoc 10(5):780-791, 2015). SCO (cyclooctyne lysine, SiChem SC-8000) was used at a final concentration of 250 μM. 3-Iodophenylalanine (Chem-Impex International Inc.) was used at a final concentration of 1 mM. SCO is efficiently recognized by PylRS^{AF} (Y306A, Y384F) (see Plass et al., Angew Chem 2011, 50:3878-3881). 3-Iodophenylalanine is recognized by PylRS^{AA} (C346A, N348A) (see Wang et al., ACS Chem Biol 2013, 8:405-415).

[0550] (B) Flow Cytometry

[0551] HEK293T cells were harvested after one day after transfection, resuspended in 1×PBS and passed through 100 μm nylon mesh. Co-transfections for flow cytometry were performed at a 1:1:1:1 ratio with 1.2 μg total DNA with:
[0552] a reporter plasmid encoding the POI (a stop codon encoding the amino acid position to be occupied by the ncAA),
[0553] a plasmid encoding the tRNA^{Pyl} having the anticodon which matches (i.e., is the reverse complement) of the stop codon in the POI-encoding sequence (hereinafter simply referred to as tRNA^{Pyl}),
[0554] a plasmid encoding the PylRS or functional mutant thereof, respectively, and
[0555] either a plasmid encoding an MCP fusion polypeptide or a mock plasmid.

[0556] Cell culture medium was exchanged for fresh medium containing the ncAA to be incorporated into the POI 4-6 h post-transfection and left until the time of harvesting.

[0557] Data acquisition and analysis were performed using an LSRFortessa SORP Cell Analyzer (Becton, Dickinson and Company) and the FlowJo software (FlowJo). Cells were first gated by cell type using forward scatter area (FSC-A) and side scatter area (SSC-A) parameters. Subsequently, single cells were identified based on SSC-A and side scatter width (SSC-W). Each shown FFC plot is the sum of three independent biological replicates from which the mean and the SEM were calculated. At least 130,000 single cells were analyzed per condition. GFP fluorescence was acquired in the 488-530/30 channel and mCherry fluorescence in the 561-610/20 channel.

[0558] (C) PylRS immunostaining and imaging, fluorescence in situ hybridization (FISH)

[0559] For immune-labelling experiments, the cells were rinsed with 1×PBS, fixed in 2% paraformaldehyde in 1×PBS for 10 min at RT, rinsed with 1×PBS again and then permeabilized in 0.5% Triton X in 1×PBS for 15 min at RT. After rinsing the permeabilized cell samples twice with 1×PBS, said samples were incubated for 90 min in blocking solution (3% BSA in 1×PBS for 90 min at RT), and then with 1 μg/ml primary antibody (polyclonal rat anti-PylRS, prepared as described in Nikic et al. (Angew Chem Int Ed Engl 2016, 55(52):16172-16176) and/or polyclonal rabbit anti-MCP (Merck, ABE76) and/or monoclonal rabbit anti-RPL26L1 antibody (EPR8478, Abcam, ab137046)) in blocking solution overnight at 4° C. The next day, the cell samples were rinsed with 1×PBS and incubated with 2 μg/ml secondary antibody (chicken anti-rat IgG(H+L) cross-adsorbed Alexa Fluor 594 conjugated antibody (Thermo Fisher Scientific, A-21471) and/or goat anti-rabbit IgG(H+L) cross-adsorbed Alexa Fluor 647 conjugated F(ab′)₂ (Thermo Fisher Scientific, A-21246)) in blocking solution for 60 min at RT. DNA was stained with Hoechst 33342 (1 μg/ml in 1×PBS) for 10 min at RT. If only DNA was stained, the cells were fixed and permeabilized as described above and then stained with Hoechst 33342 (1 μg/ml in 1×PBS) for 10 min at RT. Finally, the cells were rinsed twice with 1×PBS.

[0560] FISH experiments were performed one day after transfection analogously to the FISH experiments described in Nikic et al. (Angew Chem Int Ed Engl 2016, 55(52):16172-16176). The hybridization protocol was adapted for 24-well plates from Pierce et al. (Methods Cell Biol 122:415-436, 2014).

[0561] For imaging of only tRNA^{Pyl}, the hybridization probe 5′-CTAACCCGGCTGAACGGATTTAGAGTCCATTCGATC-3′ (labelled at the 5′ terminus with Cy5; SEQ ID NO:1) was used at 0.25 μM. After four washes with SSC and one wash with TN buffer (0.1 M TrisHCl, 150 mM NaCl), cells were incubated for 1 h at RT with 3% BSA in TN buffer prior to standard immunofluorescence labeling as described above.

[0562] For imaging of both tRNA^{Pyl} and MS2 RNA stem-loop sequence, the hybridization probe for tRNA^{Pyl} (5′-CTAACCCGGCTGAACGGATTTAGAGTCCATTCGATC-3′, labelled at the 5′ terminus with digoxigenin; SEQ ID NO:2) was used at 0.16 μM, and the hybridization probe for the MS2 RNA stem-loop sequence (5′-CTGCAGACATGGGTGATCCTCATGTTTTCTA-3′, labelled at the 5′ terminus with Alexa Fluor 647; SEQ ID NO:3) was used at 0.75 μM. After four washes with SSC, the cells were incubated for 1 h at RT in blocking buffer (0.1 M TrisHCl, 150 mM NaCl, 1× blocking reagent (Sigma 11096176001). Then, the cells were incubated with fluorescein conjugated sheep anti-digoxigenin Fab (Sigma 11207741910) at a 1:200 dilution in blocking buffer overnight at 4° C. The next day, 3 washes of 5 minutes were done in Tween buffer (0.1 M TrisHCl, 150 mM NaCl, 0.5% Tween20). DNA was stained with Hoechst 33342 (1 μg/ml in 1×PBS) for 10 min at RT.

[0563] Confocal images were acquired on a Leica SP8 STED 3× microscope equipped with a 63×/1.40 oil immersion objective using the following laser lines for excitation: 405 nm for Hoechst 33342, 488 nm for fluorescein and GFP, 548 nm for mOrange, 594 nm for Alexa Fluor 594, 647 nm for Alexa Fluor 647 and Cy5. Emission light was collected with HyD detectors at 420-500 nm and 605-680 nm respectively.

[0564] Ribosomal immunofluorescence images were taken on an Olympus Fluoroview FV3000 microscope equipped with a 60×/1.40 oil immersion objective using the following laser lines for excitation: 488 nm for GFP, 594 nm for Alexa Fluor 594, 640 nm for Alexa Fluor 647.

[0565] Images were processed using FIJI software.

[0566] (D) Constructs, Cloning and Mutagenesis

[0567] Two different fluorescent protein reporters (dual color reporter) were cloned into a pBI-CMV1 vector (Clontech 631630), one protein in one multiple cloning site and the other reporter in the other multiple cloning site. The CDS for one of the reporters encoded an mRNA carrying two MS2 RNA stem-loops fused to the 3′ untranslated region (“MS2-tag”), while the encoded mRNA of the other reporter was not MS2-tagged.

[0568] For examination of Amber suppression, The reporters GFP^{39TAG} and mCherry^{185TAG} were used as N-terminal fusion with NLS. For examination of Ochre and Opal suppression, analogous constructs were prepared (with GFP^{39TAA} and mCherry^{185TAA}, GFP^{39TGA} and mCherry^{185TGA}, respectively).

[0569] NLS::GFP^{39TAG}::MS2-tag reporter: NLS::GFP^{39TAG} was cloned with two copies of MS2 RNA stem-loops into the pBI-CMV1 vector as a reporter for successful Amber suppression in imaging experiments.

[0570] For examination of suppression of multiple Amber codons, pBI-CMV constructs for GFP^{39,149TAG} and GFP^{39,149,182TAG} were prepared which did not contain a second (e.g. mCherry) reporter in the second multiple cloning site.

[0571] Further non-limiting examples of GFPs which are applicable in the context of the invention are:

[0572] GFP^{66TAG} GFP with Amber site (SEQ ID NO:238)

[0573] GFP^{66TCG} GFP with Serine site (SEQ ID NO:240)

[0574] GFP^{66CCG} GFP with Proline site (SEQ ID NO:242)

[0575] GFP^{66CTA} GFP with Leucine site (SEQ ID NO:244)

[0576] GFP^{66TTA} GFP with Leucine site (SEQ ID NO:246)

[0577] GFP^{66ATA} GFP with Isoleucine site (SEQ ID NO:248)

[0578] GFP^{66CGG} GFP with Arginine site (SEQ ID NO:250)

[0579] GFP^{39TCG} GFP with Serine site (SEQ ID NO:252)

[0580] GFP^{39CCG} GFP with Proline site (SEQ ID NO:254)

[0581] GFP^{39CTA} GFP with Leucine site (SEQ ID NO:256)

[0582] GFP^{39CGG} GFP with Arginine site (SEQ ID NO:258)

[0583] GFP^{39TCG} LCK-GFP with Serine site (SEQ ID NO:278)

[0584] GFP^{39CCG} LCK-GFP with Proline site (SEQ ID NO:280)

[0585] GFP^{39CTA} LCK-GFP with Leucine site (SEQ ID NO:282)

[0586] Extended GFP^{39TCG} GFP with Serine site at position 39 genetically fused to GFP^{66CCG} (SEQ ID NO:284)

[0587] Extended GFP^{39CCG} GFP with Proline site at position 39 genetically fused to GFP^{66TCG} (SEQ ID NO:286)

[0588] Extended GFP^{39CTA} GFP with Leucine site at position 39 genetically fused to GFP^{66TCG}(SEQ ID NO:288)

[0589] Further non-limiting examples of mCherrys which are applicable in the context of the invention are:

[0590] mCherry^{72TAG} mCherry with Amber site (SEQ ID NO:260)

[0591] mCherry^{72TCG} mCherry with Serine site (SEQ ID NO:262)

[0592] mCherry^{72CCG} mCherry with Proline site (SEQ ID NO:264)

[0593] mCherry^{72CTA} mCherry with Leucine site (SEQ ID NO:266)

[0594] mCherry^{72TTA} mCherry with Leucine site (SEQ ID NO:268)

[0595] mCherry^{72ATA} mCherry with Isoleucine site (SEQ ID NO:270)

[0596] mCherry^{185TCG} mCherry with Serine site (SEQ ID NO:272)

[0597] mCherry^{185CCG} mCherry with Proline site (SEQ ID NO:274)

[0598] mCherry^{185CTA} mCherry with Leucine site (SEQ ID NO:276)

[0599] Further non-limiting examples of mCherry constructs comprising different TN loops which are applicable in the context of the invention are:

[0600] mCherry^{190TAG}-2×PP7 mCherry with amber site and 2× pp7 loops (SEQ ID NO:216)

[0601] mCherry^{190TAG}-4×PP7 mCherry with amber site and 4× pp7 loops (SEQ ID NO:218)

[0602] mCherry^{190TAG}-6×PP7 mCherry with amber site and 6× pp7 loops (SEQ ID NO:220)

[0603] H2B-mCherry^{190TAG}-2×MS2 Human Histone H2B type 1-J (Uniprot: P06899) fused to mCherry with amber site and 2× ms2-loops (SEQ ID NO:222)

[0604] They may be fused into the polypeptide chain of any of the AFP molecules described herein, in particular at a position within the fusion molecule which does not inhibit the function of anyone of the other polypeptide segments (APs and EPs) of the AFP molecule. Examples of such epitope-tag containing AFP molecules are given below.

[0605] Constructs for OT assemblies were prepared as follows: tRNA^{Pyl} was cloned under the control of a human U6 promoter, and all other constructs were under CMV promoters cloned in the pcDNA3.1 (Invitrogen V86020) vector. MCP protein was cloned from the addgene plasmid #31230 and FUS from the Addgene plasmid #26374. In all FUS fusions, amino acids 1-478(S108N) were used, replacing the C-terminal NLS region by a Flag-tag. In all RS fusions the previously reported efficient NES::PylRS^{AF} (Y306A, Y384F) sequence was used (see, e.g., Nikic et al., Angew Chem Int Ed Engl 2016, 55(52):16172-16176). The PylRS mutant PylRS^{A} (N346A, C348A) was cloned via site-directed mutagenesis starting from wildtype PylRS. The SPD5 gene was ordered from Genewiz and fused to MCP and PylRS^{AF} via restriction cloning. KIF13A₁₋₄₁₁ and KIF16B₁₋₄₀₀ were cloned from human cDNA and inserted into pcDNA3.1 via restriction cloning. P390 of KIF13A₁₋₄₁₁ was removed via side directed mutagenesis. KIF13A₁₋₄₁₁,ΔP390 and KIF16B.₄₀₀ fusions with MCP, PylRS^{AF}, EWSR1::MCP, FUS::PylRS^{AF}, FUS::PylRS^{AA}, SPD5::MCP and SPD5::PylRS^{AF} were assembled via Gibson assembly (see Gibson et al., Nat Methods 2009, 6:343-345).

[0606] Constructs for differential imaging experiments: To selectively express Nup153-EGFP^{149TAG} and Vim^{116TAG}-mOrange, one gene was first inserted together with an MS2-tag into pBI-CMV1 (compare Nikic et al., Angew Chem Int Ed Engl 2016, 55(52):16172-16176). Subsequently, the other gene was inserted without MS2-tag. INSR^{676TAG}::mOrange was fused to an MS2-tag by replacing Vim^{116TAG}-mOrange in the pBI vector bearing Nup153::EGFP^{149TAG} and Vim^{116TAG}::mOrange::MS2-tag to yield a bicistronic vector with INSR^{676TAG}::mOrange in one and Nup153::EGFP^{149TAG} in the other cassette.

[0607] Multicistronic Amber suppression vectors for COS-7 cell experiments: As COS-7 cells have lower transfection efficiency; we generated multicistronic vectors harboring the components of an OT assembly. To assemble multicistronic Amber suppression vectors, first one copy of tRNA^{Pyl} under the control of a human U6 promoter was inserted into the pBI-CMV1 vector via Gibson assembly. Subsequently, first the AFP CDS KIF16B::FUS::PylRS^{AF} and finally the AFP CDS KIF16B::EWSR1::MCP were inserted via Gibson assembly. Alternatively, a previously published pcDNA3.1 based construct (see Nikic et al., Angew Chem Int Ed Engl 2016, 55(52):16172-16176) expressing NES::PylRS^{AF} under a CMV promoter and tRNA^{Pyl} under a human U6 promoter was used. Constructs with U6-tRNA^{Pyl}, KIF16B::FUS::PylRS^{AF} and KIF16B::EWSR1::MCP, or NES::PylRS^{AF} were alternatively inserted into a pDonor vector (GeneCopoeia).

[0608] The respective sequence information on AFPs used in the following experiments can be taken from the listing of sequences given below.

### Example 1—RNA-TP/O-RS Fusion and AFPs Comprising a Single AP

[0609] An OT assembly (“OT organelle”, FIG. 1) was engineered having the following components:

[0610] i) An mRNA-targeting system in which two MS2 RNA stem-loops (MS2-tag) were fused to the mRNA of choice coding for the POI, creating an mRNA::ms2 fusion. The MS2-tag binds specifically to the MS2 bacteriophage coat protein (MCP) (see Bertrand et al., Mol Cell 1998, 2:437-445), which will thus form a stable and specific mRNA::ms2-MCP complex in cells. The MS2-tag was always fused to the 3′ untranslated region (3′ UTR) of the mRNA, which ensures translation to yield a scar-less final POI.

[0611] ii) A tRNA/RS suppressor pair. The orthogonal tRNA/RS pair from the Methanosarcina mazei pyrrolysyl system (tRNA^{Pyl}/PylRS) was chosen because it has enabled the encoding of more than 200 ncAAs with diverse functionalities into proteins using GCE in a multitude of cell types and species, including E. coli, mammalian cells and even living mice (see, e.g., Liu et al., Annu Rev Biochem 2010, 79:413-444; Lemke, ChemBioChem 2014, 15:1691-1694; Chin, Nature 2017, 550; 53-60).

[0612] iii) The assembler (AP) was the key component required to form an OT assembly. The purpose of the assembler was to create membrane-less structures in the form of a dense phase, aggregate, droplet or condensate, in which the mRNA::ms2-MCP complex is brought into close proximity of the tRNA^{Pyl}/PylRS pair.

[0613] The simplest strategy tested was the bimolecular fusion of MCP::PylRS (termed B, FIG. 2). In addition, strategies were tested which were expected to yield much larger assemblies. All of those assembly systems were composed of an assembler fusion to PylRS co-expressed with an assembler fusion to MCP. Assembler::PylRS⋅assembler::MCP were expected to form large aggregates (co-expression herein denoted with “⋅”). One tested assembly strategy was based on phase separation of proteins and one based on the assembly of kinesins, which are abbreviated herein as P and K, respectively (FIG. 2A). Furthermore, for each P and K approach two different molecular designs (P1, P2 and K1, K2, respectively) were tested which are summarized as follows:

[0614] P1. Previous studies have established the capacity of the proteins fused-in sarcoma (FUS) and Ewing sarcoma breakpoint regions 1 (EWSR1) to form mixed droplet-like structures by phase separation. They both contain a prion-like disordered domain that facilitates phase separation into liquid, gel and solid states (see, e.g., Altmeyer et al., Nat Commun 2015, 6:8088; Patel et al., Cell 2015, 162:1066-1077). In a phase-separated state, these proteins are locally highly concentrated (several orders of magnitude) compared to the remaining soluble fraction in the cytoplasm. FUS was fused to PylRS and EWSR1 was fused to MCP. It was expected that this would lead to the formation of droplets in which MCP and PylRS are highly enriched. P1 is denoted FUS::PylRS⋅EWSR1::MCP.

[0615] P2. The Caenorhabditis elegans protein spindle-defective protein 5 (SPD5) has been shown to phase separate into particularly large (several micron-sized) droplets (see Woodruff et al., Cell 2017, 169:1066-1077, e1010). In a phase-separated state, SPD5 is locally highly concentrated compared to the remaining soluble fraction in the cytoplasm (by several orders of magnitude). It was expected that a protein fused to SPD5 would condense into droplets. Similarly to FUS-EWSR1 droplets, PylRS fused to SPD5 and MCP fused to SPD5 were expected to be highly enriched. P2 is denoted SPD5::PylRS⋅SPD5::MCP.

[0616] K1. Certain kinesin truncations constitutively move towards microtubule-plus ends in living cells (Soppina et al., Proc Natl Acad Sci U.S.A. 2014, 111:5562-5567). One such truncated kinesin is KIF13A_{1-411,ΔP390}, and it was expected that PylRS and MCP, respectively, fused to this kinesin truncation and co-expressed would be locally enriched, due to spatial targeting to microtubule-plus ends. K1 is denoted KIF13A_{1-411,ΔP390}::PylRS⋅KIF13A_{1-411,ΔP390}::MCP.

[0617] K2. By analogy to K1, the truncated kinesin KIF16B₁₋₄₀₀ was also tested. K2 is denoted KIF16B₁₋₄₀₀::PylRS⋅KIF16B₁₋₄₀₀::MCP.

[0618] In order to evaluate these assemblers for facilitating functional orthogonal translation of an MS2-tagged mRNA, a dual-reporter construct was designed, in which GFP and mCherry mutants are simultaneously expressed from two different expression cassettes from one plasmid, ensuring that the mRNA ratio between them is constant across all experiments. Stop codons were introduced at permissive sites into GFP at position 39 (GFP^{39STOP}) and into mCherry at position 185 (mCherry^{185STOP}; FIG. 2B). Only if stop codon suppression is successful will the corresponding green or red fluorescent protein be produced. Transfected cells (tRNA^{Pyl} and ncAA were always present unless specifically noted otherwise) were analyzed by fluorescence flow cytometry (FFC); settings were adjusted so that an approximate diagonal results in the FFC plots if GFP and mCherry are expressed from this plasmid using the conventional cytoplasmic PylRS system, which cannot differentiate mRNAs. A selective and functional OT organelle should selectively express mCherry only if the MS2-tag is fused to the 3′ UTR of the mCherry mRNA, leading to the appearance of a vertical line in the cytometry plot (FIG. 2B). Unless otherwise reported, all experiments where performed in the presence of tRNA^{Pyl} and the ncAA SCO, a widely used and well characterized lysine derivative, the side chain of which carries a cyclooctyne that can be used in a variety of click-chemistry reactions to install diverse chemical groups onto the protein. As previously reported, this ncAA is efficiently encoded by a Y306A, Y384F double mutant of PylRS (for simplicity this mutant is designated PylRS herein, unless otherwise specified) (see Nikic et al., Angew Chem 2014, 53:2245-2249; Plass, Angew Chem 2012, 51:4166-4170; Plass et al., Angew Chem 2011, 50:3878-3881). Omission of the ncAA served as a standard negative control and lead to no expression of GFP or mCherry.

[0619] The performance of each OT system was evaluated according to its selectivity and relative efficiency. Selectivity is defined as the ratio r of the mean mCherry FFC signal divided by the mean GFP signal. Final values are expressed as fold selectivity relative to that of cytoplasmic PylRS. Relative efficiency is defined as the mean mCherry signal of each system divided by the mean mCherry signal of the cytoplasmic PylRS system, which serves as the reference (here defined as 100%). All results on selectivity (dark-gray positive bars) and efficiency (light-gray negative bars) are summarized in the bar plot in FIG. 2C. Selected FFC data is also shown in FIG. 2D.

[0620] The simplest strategy B (MCP fused to PylRS) showed an about 1.5-fold selectivity gain (FIG. 2C). The OT system P1 (based on phase separation of FUS/EWSR1) had a somewhat lower selectivity gain (FIG. 2C, D). The P2 system (based on SPD5) showed an approximate twofold selectivity gain (FIG. 2C). For K1 a twofold increase in selectivity was observed (FIG. 2C). The K2 system behaved similarly (FIG. 2C,D). In total, the selectivity gains were relatively small, but robustly detected and distinguishable from a simple efficiency drop. The observed selectivity effect (data not shown) was robust across a titration of Amber suppression efficiencies (specifically, 0.48 ng, 2.4 ng, 12 ng, 60 ng or 300 ng tRNA^{Pyl} construct, respectively, were used), indicating that bringing the ncAA aminoacylation activity (i.e. the tRNAPyl/PylRS in the presence of ncAA) in direct proximity of the target mRNA represents a pathway to more selective codon suppression.

### Example 2—AFPs Comprising a Combination of Two APs

[0621] AFPs comprising combinations of the APs described in example 1 were tested in an analogous manner, those were:

[0622] K1::P1=KIF13A_{1-411,ΔP390}::FUS::PylRS⋅KIF13A_{1-411,ΔP390}::EWSR1::MCP,

[0623] K2::P1=KIF16B₁₋₄₀₀::FUS::PylRS⋅KIF16B₁₋₄₀₀::EWSR1::MCP,

[0624] K1::P2=KIF13A_{1-411,ΔP390}::SPD5::PylRS⋅KIF13A_{1-411,ΔP390}::SPD5::MCP,

[0625] K2::P2=KIF16B₁₋₄₀₀::SPD5::PylRS⋅KIF16B₁₋₄₀₀::SPD5::MCP.

[0626] For all combinations an at least fivefold selectivity gain was observed indicating orthogonal translation. The best performing of these systems was based on the fusion of FUS/EWSR1 with KIF16B₁₋₄₀₀, K2::P1 and exhibited a selectivity of eightfold (box in FIG. 2C). This was also directly obvious from the FFC data, in which the bright, mCherry-positive cell population was clearly retained, whereas GFP expression was minimal (arrow in FIG. 2D).

### Example 3—AFPs Comprising a Combination of APs Including a Membrane-Targeting AP

[0627] AFPs comprising combinations of APs derived from phase separation polypeptides (PSPs), FUS and EWSR1 (also termed EWS herein), optionally fused to SYNZIP segments, and different APs which acts as a membrane-targeting signal, LcK, EB1, CG1, EBAG9_{full length}, EBAG9₁₋₂₉, CMP Sia Tr, P450 2C1₁₋₂₇ and P450 2C1₁₋₂₉ were tested in a manner analogous to example 2.

[0628] LcK is a cell membrane-targeting signal (Resh, Bba-Mol Cell Res 1999, 1451:1-16) that adds an amphipathic helix post translationally to the POI. For these experiments, the AFPs LcK::FUS::PylRS and LcK::EWSR1::MCP were co-expressed in HE293T cells (see FIGS. 3 and 6C). Testing of this system with the same dual reporter resulted in a dramatic shift in the signal and a strong selectivity for the expression solely of the MS2-tagged mCherry compared to the control PylRS. See FIG. 4 and FIG. 5 showing a 26-fold selectivity gain as compared to the control. IF and FISH for MCP, PylRS and tRNA show a clear membrane signal with appearance of occasional droplet-like structures and a perfect co-localization of all the components.

[0629] Without wishing to be bound by theory, it is assumed that targeting the OT system to a membrane results in a confinement of the components to a 2D surface (i.e. a film), offering an even higher spatial segregation than a cytoplasmic droplet. In accordance with such a cumulative effect of the two combined assembler strategies (LcK for membrane targeting, and FUS/EWSR1 for droplet generation), it was shown that the presence of the FUS/EWSR1 “assemblers” is not a requirement in an LcK-fused (and thus membrane-anchored system) for obtaining selective Amber suppression (data not shown). Nevertheless, the combination of the LcK-targeting with FUS/EWSR1 resulted in a higher selectivity of the system. Further, it was found that swapping the MS2-tag on the fluorescent reporters, yielded a swapped selectivity in the FFC data, underlining the selective (orthogonal) translation of the MS2-tagged mRNA.

[0630] For a further LcK based experiment, the AFP constructs LcK::FUS::SYNZIP1::PylRS and EWSR1::SYNZIP2::MCP; were co-expressed in HE293T cells (see FIG. 8A). Testing of this system with the same dual reporter resulted in a dramatic shift in the signal and a strong selectivity for the expression solely of the MS2-tagged mCherry. Upon expression SYNZIP1 and 2 pair and recruit MCP to a plasma membrane based OT organelle. In a comparative approach co-expressing the AFP constructs LcK::FUS::PylRS and EWSR1::SYNZIP2::MCP, wherein SYNZIP1 is missing, no selectivity of translation could be observed (see FIG. 8B) EB1 is a microtubule plus ends-targeting signal ((Nehlig A, Molina A, Rodrigues-Ferreira S, Honoré S, Nahmias C. Regulation of end-binding protein EB1 in the control of microtubule dynamics. Cell Mol Life Sci. 2017; 74(13):2381-2393. doi:10.1007/s00018-017-2476-2). For these experiments, the AFP construct EB1::PylRS with EB1::MCP, EB1:FUS::PylRS with EB1::EWSR1::MCP or EB1::FUS::MCP::PylRS were expressed in HE293T cells. Testing of this system with the same dual reporter resulted in a shift in the signal and a strong selectivity for the expression solely of the MS2-tagged mCherry compared to the control PylRS. See FIG. 6B.

[0631] CG1 is a nuclear membrane-targeting signal (Kim S J, Fernandez-Martinez J, Nudelman I, et al. Integrative structure and functional anatomy of a nuclear pore complex. Nature. 2018; 555(7697):475-482. doi:10.1038/nature26003) For these experiments, the AFP constructs CG1::FUS::PylRS and CG1::EWSR1::MCP were co-expressed in HE293T cells.

[0632] Testing of this system with the same dual reporter resulted in a shift in the signal and a strong selectivity for the expression solely of the MS2-tagged mCherry compared to the control PylRS. See FIG. 6E.

[0633] EBAG9_{full length} and EBAG9₁₋₂₉ are Golgi membrane-targeting signals (Engelsberg A, Hermosilla R, Karsten U, Schulein R, Dörken B, Rehm A. The Golgi protein RCAS1 controls cell surface expression of tumor-associated O-linked glycan antigens. J Biol Chem. 2003; 278(25):22998-23007. doi:10.1074/jbc.M301361200). For these experiments, the AFP constructs EBAG9₁₋₂₉::FUS::PylRS and EBAG9₁₋₂₉::EWSR1::MCP were co-expressed in HE293T cells. Testing of this system with the same dual reporter resulted in a shift in the signal and a strong selectivity for the expression solely of the MS2-tagged mCherry compared to the control PylRS. See FIG. 6F (left side).

[0634] CMP Sia Tr is a Golgi membrane-targeting signal (Eckhardt M, Gotza B, Gerardy-Schahn R. Membrane topology of the mammalian CMP-sialic acid transporter. J Biol Chem. 1999; 274(13):8779-8787. doi:10.1074/jbc.274.13.8779). For these experiments, the AFP constructs CMP Sia Tr::FUS::PylRS and CMP Sia Tr::MCP were co-expressed in HE293T cells. Testing of this system with the same dual reporter resulted in a shift in the signal and a strong selectivity for the expression solely of the MS2-tagged mCherry compared to the control PylRS. See FIG. 6F (right side).

[0635] P450 2C1₁₋₂₇ is an ER membrane-targeting signal (Fazal F M, Han S, Parker K R, et al. Atlas of Subcellular RNA Localization Revealed by APEX-Seq. Cell. 2019; 178(2):473-490.e26. doi:10.1016/j.cell.2019.05.027). For these experiments, the AFP constructs P450 2C1₁₋₂₇::FUS::PylRS and P450 2C1₁₋₂₇::EWSR1::MCP or P450 2C1₁₋₂₉::FUS::MCP::PylRS were co-expressed in HE293T cells. Testing of this system with the same dual reporter resulted in a shift in the signal and a strong selectivity for the expression solely of the MS2-tagged mCherry compared to the control PylRS. See FIG. 6G.

### Example 4—Validation of the Selectivity Gain being Specific to the Interaction of the mRNA MS2-Tag and MCP

[0636] To validate that the observed selectivity gain was specific to the interaction of the MCP segment with the MS2-tag of the mRNA, all the OT systems were characterized by expressing the RS assembler fusion of each OT system without MCP. As expected, no selective orthogonal translation of MS2-tagged mRNA was observed in those cases (See FIG. 6 A to G). Additionally, a reporter inversion was performed by moving the MS2-tag from the mCherry to the GFP cassette in the dual-color reporter, which as expected inverted selectivity of the system towards dominant GFP expression (data not shown). This established that the OT systems acted selectively on the MS2-tagged RNA.

### Example 5—Introduction of Multiple ncAAs into the Same POI

[0637] GCE can also be used to introduce multiple ncAAs into the same POI (see, e.g., Liu et al., Annu Rev Biochem 2010, 79:413-444; Lemke, ChemBioChem 2014, 15:1691-1694; Chin, Nature 2017, 550; 53-60). However, only very few publications report on more than one, that is, two- or three-codon suppression in the same protein in eukaryotes, as yields typically suffer compared to single-codon suppression (see Xiao et al., Angew Chem 2013, 52:14080-14083; Schmied et al., J Am Chem Soc 2014, 136:15577-15583; Zhang et al., Biochem Biophys Res Co 2017, 489:490-496). Notably, even dual- and triple-Amber proteins were still suppressed with the OT organelle (data not shown).

### Example 6—OT with 3-Iodophenylalanine

[0638] To ensure that also other ncAAs can be translated by the OT assembly, another structurally different ncAA (3-iodophenylalanine) was tested which is a phenylalanine derivative instead of a lysine derivative (such as SCO) and is encoded by a different PylRS mutant (N346A, C348A) (see Wang et al., ACS Chem Biol 2013, 8:405-415). Consistent results were also observed for this system (FIG. 2C).

### Example 7—OT with Different Selector Codons

[0639] As Opal and Ochre codons are highly abundant in eukaryotic genomes (52% Opal, 28% Ochre in the human genome), the Amber codon is by far the most used for GCE in eukaryotes. In addition, genomic approaches to orthogonal translation by removing those codons in the entire eukaryotic genome would be even more challenging then for the Amber codon and are currently beyond the state of the art. However, in the OT systems of the present invention, a simple mutation in the anticodon loop of the tRNA^{Pyl}, as well as in the respective codon in the MS2-tagged POI-encoding mRNA allows for orthogonal translation of those codons. FFC analysis revealed that the OT systems of the invention provide freedom of choice with respect to the stop (selector) codon (FIG. 2C, E). In fact, Opal suppression turned out to be the best performing system, showing an 11-fold selectivity increase. Ochre suppression still showed fivefold selectivity increase with 20% efficiency.

### Example 8—Orthogonal Translation of Proteins of Various Cellular Compartments

[0640] To visualize the power of the OT^{K2::P1} system (the best performing Amber suppression OT system in terms of selectivity and efficiency) beyond “simple” reporters, it was intended to show differential expression of human nucleoporin 153 (Nup153) versus cytoskeletal vimentin. Nup153 locates to the nuclear pore complex and is more than 1500 amino acids long. Hence, its mRNA is approximately six-fold larger than those of the fluorescent protein reporters used above. For this experiment a previously described C-terminal GFP fusion, with an Amber mutation (Nup153::EGFP^{149TAG}) was used that gave rise to a characteristic nuclear envelope stain in confocal images only if Amber suppression was successful (see Nikic et al., Angew Chem 2016, 55:16172-16276). Said Nup153::EGFP^{149TAG} was now tagged at the mRNA level with an MS2-tag (nup153::egfp^{149TAG}::ms2) and co-expressed from the same plasmid with vimentin (a cytoskeletal protein) containing an Amber codon at position 116 fused to mOrange (Vim^{116TAG}::mOrange). Expression in HEK293T cells resulted in production of both proteins in the presence of the cytoplasmic PylRS showing the characteristic nuclear envelope and cytoskeletal staining, respectively. Using the OT^{K2::P1} assembly only Nup153::GFP was visible (selective nuclear rim stain in confocal images of the co-transfected HEK293T cells). Consistent results were also observed in COS-7 cells. Swapping the MS-tag to vimentin inverted the effect, so that only Vim^{116TAG}::mOrange was visible (observed for both COS-7 and HEK293T cell experiments). This showed that the OT^{K2::P1} worked for dramatically different mRNAs.

### Example 9—Orthogonal Translation of Transmembrane Proteins

[0641] It was also shown that transmembrane proteins can be selectively expressed using the OT^{K2:P1} assembly. Membrane protein expression represents another layer of translational complexity, as ribosomes need to bind the endoplasmic reticulum during translation, where the proteins are co-translationally inserted into the membrane. In this experiment, a fusion of insulin receptor 1 with an Amber codon at position 676 with mOrange (INSR^{676TAG}::mOrange) was used, which locates to the plasma membrane and gives rise to a characteristic plasma membrane stain in HEK293T cells (see Nikic et al., Angew Chem 2014, 53:2245-2249). This construct was tagged with an MS2-tag in the 3′ UTR and cloned with Nup153::EGFP^{149TAG} into one dual-cassette plasmid. Then the construct was expressed in HEK293T cells either in the presence of the cytoplasmic PylRS system or in the presence of the OT^{K2::P1} assembly. In the presence of the OT^{K2::P1} assembly, selective expression of the MS2-tagged protein and the expected plasma membrane localization of INSR^{676TAG}::mOrange were observed (data not shown), indicating the potential of the OT system of the present invention to participate in even more complex membrane-associated translational processes.

### Example 10—Spatial Distribution of Elements of the OT System in the Cell

[0642] The spatial distribution of AFPs and particularly PylRS in cells was assessed using immunofluorescence (IF). Additionally, fluorescence in situ hybridization (FISH) was used for detecting tRNA^{Pyl}. In contrast to the dual color reporter used in the FFC experiments above, in all IF/FISH experiments a single color NLS-GFP^{39TAG} reporter that was fused to an MS2-tag (nls-gfp^{39TAG}::ms2) was used to identify cells active in Amber suppression (this yields a green nucleus if Amber suppression is successful and helped to optimize distinguishable color channels). IF and FISH stainings showed that in contrast to cytoplasmic PylRS, the P1 system formed small, intracellular assembler::PylRS droplets (data not shown). This indicated the occurrence of phase separation. The tRNA^{Pyl} co-localized well with highly dispersed assembler::PylRS droplets, indicating that it could nicely partition into the assembler::PylRS phase. Additional stainings showed further co-localization with assembler::MCP (data hot shown). Compared to P1, the P2 system showed larger but still multiple dispersed droplet-like structures (data not shown). With the combination of both assembler strategies (K1::P1, K2::P1, K1::P2, K2::P2) the formation of large micron-sized organelle-like structures in the cytoplasm was observed, these structures were in most cases localized to few or even a single position per cell. For the combined assemblers, mRNA::ms2, tRNA^{Pyl}, assembler::PylRS and assembler::MCP all co-localized to organelle-like structures. The combination of the two assembler strategies, that is, phase separation paired with spatial targeting by kinesin truncations, yielded the best confinement as determined by FISH and IF and the highest selectivity increase. This is consistent with the hypothesis that the higher spatial segregation and thus higher local concentration of the tRNA^{Pyl}, PylRS and mRNA correlates with higher selectivity.

[0643] Ribosomes were stained to see whether they co-localize to the OT^{K2::P1} assembly. IF staining of the ribosomal protein RPL26L1 revealed strong co-localization with the OT^{K2::P1} organelle (data not shown) demonstrating ribosome recruitment, tentatively due to binding to mRNA::ms2 during translation. High ribosomal mobility can also explain why it was possible to successfully express the membrane protein INSR (construct: INSR^{676TAG}::mOrange::ms2). Without wishing to be bound by theory, the experimental results strongly suggests that selective orthogonal translation happens within close proximity of, potentially even inside, the OT assemblies, by a set of recruited ribosomes that are near or fully immersed into a concentrated pool of tRNA^{Pyl}. tRNA^{Pyl} itself is recruited to the OT^{K2::P1} assembly due to its affinity for assembler::PylRS and can readily co-partition into the droplet to be aminoacylated with its cognate ncAA, while assembler::MCP recruits MS2-tagged mRNA. This in turn attracts ribosomes to co-partition into the dense phase formed by the dual assembler system (K2::P1=KIF16B::FUS::PylRS and KIF16B::EWSR1::MCP), which maintains access to other translation factors for translation to function. Ribosomes elsewhere in the cytoplasm that are not exposed to tRNA^{Pyl} perform their canonical function to terminate translation whenever they encounter a stop codon.

### Example 11—Further OT Systems

[0644] In addition to the OT systems described in the preceding examples, a variety of other OT systems were tested and found to allow for selective orthogonal translation of the reporter (i.e. the POI). A summary of these experiments is shown in the Table 1 below. Unless noted otherwise, the cytoplasmic NES-PylRS system as previously described by Nikic et al. (Angew Chem Int Ed Engl 2016, 55(52):16172-16176) but with the corresponding AF, AA or AAAF mutations was used as a nonspecific reference (negative control). All experiments were performed in presence of the codon-specific tRNA^{Pyl} and PylRS mutant corresponding ncAAs.

TABLE 1
Tested OT systems

| Fusion protein(s) | | |
|---|---|---|
| comprising O-RS and | | |
| RNA-TP segments | Reporter (POI) | cell lines |
| EWSR1-MCP•FUS-PylRS^{AF} | GFP^{39TAG}-2xMS2•mCherry^{185TAG} | HEK293T/COS-7 |
| | mCherry^{185TAG}-2xMS2•GFP^{39TAG} | |
| FUS-MCP•FUS-PylRS^{AF} | mCherry^{185TAG}-2xMS2•GFP^{39TAG} | HEK293T |
| FUS-MCP-PylRS^{AF} | GFP^{39TAG}-2xMS2•mCherry^{185TAG} | HEK293T/COS-7 |
| | mCherry^{185TAG}-2xMS2•GFP^{39TAG} | |
| MCP-PylRS^{AF} | GFP^{39TAG}-2xMS2•mCherry^{185TAG} | HEK293T/COS-7 |
| | mCherry^{185TAG}-2xMS2•GFP^{39TAG} | |
| SPD5-MCP•SPD5-PylRS^{AF} | GFP^{39TAG}-2xMS2•mCherry^{185TAG} | HEK293T |
| | mCherry^{185TAG}-2xMS2•GFP^{39TAG} | |
| SPD5-MCP-PylRS^{AF} | GFP^{39TAG}-2xMS2•mCherry^{185TAG} | HEK293T |
| | mCherry^{185TAG}-2xMS2•GFP^{39TAG} | |
| KIF16B-PylRS^{AF}•KIF16B-MCP | GFP^{39TAG}-2xMS2•mCherry^{185TAG} | HEK293T/COS-7 |
| | mCherry^{185TAG}-2xMS2•GFP^{39TAG} | |
| KIF16B-MCP-PylRS^{AF} | GFP^{39TAG}-2xMS2•mCherry^{185TAG} | HEK293T/COS-7 |
| | mCherry^{185TAG}-2xMS2•GFP^{39TAG} | |
| KIF16B-FUS-PylRS^{AF}•KIF16B-EWSR1-MCP | GFP^{39TAG}-2xMS2•mCherry^{185TAG} | HEK293T/COS-7 |
| | mCherry^{185TAG}-2xMS2•GFP^{39TAG} | |
| | mCherry^{185TAA}-2xMS2•GFP^{39TAA} | |
| | mCherry^{185TGA}-2xMS2•GFP^{39TGA} | |
| | Nup153-EGFP^{149TAG}-2xMS2•Vimentin^{116TAG}-mOrange | |
| | Vimentin^{116TAG}-mOrange-2xMS2•Nup153-EGFP^{149TAG} | |
| | INSR^{676TAG}-EGFP-2xMS2•Nup153-EGFP^{149TAG} | |
| | INSR^{676TAG}-mOrange-2xMS2•Nup153-EGFP^{149TAG} | |
| | INSR^{676TAG}-I NSR-2xMS2•Nup153-EGFP^{149TAG} | |
| KIF16B-SPD5-PylRS^{AF}•KIF16B-SPD5-MCP | GFP^{39TAG}-2xMS2•mCherry^{185TAG} | HEK293T |
| | mCherry^{185TAG}-2xMS2•GFP^{39TAG} | |
| KIF16B-FUS-PylRS^{AA}•KIF16B-EWSR1-MCP | mCherry^{185TAG}-2xMS2•GFP^{39TAG} | HEK293T |
| KIF16B-FUS-PylRS^{AAAF}•KIF16B-EWSR1-MCP | mCherry^{185TAG}-2xMS2•GFP^{39TAG} | HEK293T |
| KIF13A-PylRS^{AF}•KIF13A-MCP | mCherry^{185TAG}-2xMS2•GFP^{39TAG} | HEK293T |
| KIF13A-FUS-PylRS^{AF}•KIF13A-EWSR1-MCP | mCherry^{185TAG}-2xMS2•GFP^{39TAG} | HEK293T |
| | GFP^{39TAG}-2xMS2•mCherry^{185TAG} | |
| | mCherry^{185TAG}-4xBoxB•GFP^{39TAG}-2xMS2 | |
| | mCherry^{185TAA}-2xMS2•GFP^{39TAA} | |
| | mCherry^{185TGA}-2xMS2•GFP^{39TGA} | |
| KIF13A-SPD5-PylRS^{AF}•KIF13A-SPD5-MCP | mCherry^{185TAG}-2xMS2•GFP^{39TAG} | HEK293T |
| KIF13A-FUS-PylRS^{AA}•KIF13A-EWSR1-MCP | mCherry^{185TAG}-2xMS2•GFP^{39TAG} | HEK293T |
| KI F13A-FUS-PylRS^{AAAF}•KIF13A-EWSR1-MCP | mCherry^{185TAG}-2xMS2•GFP^{39TAG} | HEK293T |
| LCK-FUS-PylRS^{AF}•LCK-EWSR1-MCP | GFP^{39TAG}-2xMS2•mCherry^{185TAG} | HEK293T/COS-7 |
| | mCherry^{185TAG}-2xMS2•GFP^{39TAG} | |
| | mCherry^{185TAG}-4xBoxB•GFP^{39TAG}-2xMS2 | |
| | mCherry^{185TAA}-2xMS2•GFP^{39TAA} | |
| | mCherry^{185TGA}-2xMS2•GFP^{39TGA} | |
| | Nup153-EGFP^{149TAG}-2xMS2•Vimentin^{116TAG}-mOrange | |
| | Vimentin^{116TAG}-mOrange-2xMS2•Nup153-EGFP^{149TAG} | |
| LCK-FUS-MCP-PylRS^{AF} | mCherry^{185TAG}-2xMS2•GFP^{39TAG} | HEK293T |
| | mCherry^{185TAG}-4xBoxB•GFP^{39TAG}-2xMS2 | |
| LCK-FUS-PylRS^{AAAF}•LCK-EWSR1-MCP | mCherry^{185TAG}-2xMS2•GFP^{39TAG} | HEK293T |
| | mCherry^{185TAG}-4xBoxB•GFP^{39TAG}-2xMS2 | |
| LCK-FUS-PylRS^{AF}•LCK-EWSR1-4xλ_{N22} | mCherry^{185TAG}-4xBoxB•GFP^{39TAG} | HEK293T |
| | mCherry^{185TAG}-4xBoxB•GFP^{39TAG}-2xMS2 | |
| LCK-PylRS^{AF}•LCK-MCP | GFP^{39TAG}-2xMS2•mCherry^{185TAG} | HEK293T/COS-7 |
| | mCherry^{185TAG}-2xMS2•GFP^{39TAG} | |
| | mCherry^{185TAG}-4xBoxB•GFP^{39TAG}-2xMS2 | |
| LCK-PylRS^{AAAF}•LCK-MCP | mCherry^{185TAG}-2xMS2•GFP^{39TAG} | HEK293T |
| | mCherry^{185TAG}-4xBoxB•GFP^{39TAG}-2xMS2 | |
| LCK-FUS-3xMCP-PylRS^{AF} | mCherry^{185TAG}-2xMS2•GFP^{39TAG} | HEK293T |
| | mCherry^{185TAG}-4xBoxB•GFP^{39TAG}-2xMS2 | |
| TOM20-FUS-PylRS^{AF}•TOM20-EWSR1-MCP | mCherry^{185TAG}-2xMS2•GFP^{39TAG} | HEK293T |
| | mCherry^{185TAG}-4xBoxB•GFP^{39TAG}-2xMS2 | |
| TOM20-FUS-PylRS^{AF}•TOM20-EWSR1-4xλ_{N22} | mCherry^{185TAG}-4xBoxB•GFP^{39TAG} | HEK293T/COS-7 |
| | mCherry^{185TAG}-4xBoxB•GFP^{39TAG}-2xMS2 | |
| TOM20-FUS-PylRS^{AA}•TOM20-EWSR1-MCP | mCherry^{185TAG}-2xMS2•GFP^{39TAG} | HEK293T |
| TOM20-FUS-PylRS^{AA}•TOM20-EWSR1-4xλ_{N22} | mCherry^{185TAG}-4xBoxB•GFP^{39TAG} | HEK293T |
| TOM20-FUS-PylRS^{AAAF}•TOM20-EWSR1-MCP | mCherry^{185TAG}-2xMS2•GFP^{39TAG} | HEK293T |
| TOM20-FUS-PylRS^{AAAF}•TOM20-EWSR1-4xλ_{N22} | mCherry^{185TAG}-4xBoxB•GFP^{39TAG} | HEK293T |
| | mCherry^{185TAG}-4xBoxB•GFP^{39TAG}-2xMS2 | |
| TOM20-3xMCP-PylRS^{AF} | mCherry^{185TAG}-2xMS2•GFP^{39TAG} | HEK293T |
| | mCherry^{185TAG}-4xBoxB•GFP^{39TAG}-2xMS2 | |
| TOM20-FUS-3xMCP-PylRS^{AF} | mCherry^{185TAG}-2xMS2•GFP^{39TAG} | HEK293T |
| TOM20-FUS-3xMCP-PylRS^{AAAF} | mCherry^{185TAG}-2xMS2•GFP^{39TAG} | HEK293T |
| | mCherry^{185TAG}-4xBoxB•GFP^{39TAG}-2xMS2 | |
| TOM20-FUS-4xλ_{N22}-PylRS^{AF} | mCherry^{185TAG}-4xBoxB•GFP^{39TAG}-2xMS2 | HEK293T/COS-7 |
| TOM20-FUS-4xλ_{N22}-PylRS^{AAAF} | mCherry^{185TAG}-4xBoxB•GFP^{39TAG}-2xMS2 | HEK293T |
| KIF16B-FUS-4xλ_{N22}-PylRS^{AF} | mCherry^{185TAG}-4xBoxB•GFP^{39TAG} | HEK293T |
| | mCherry^{185TAG}-4xBoxB•GFP^{39TAG}-2xMS2 | |
| KIF16B-SPD5-4xλ_{N22}-PylRS^{AF} | mCherry^{185TAG}-4xBoxB•GFP^{39TAG} | HEK293T |
| KIF16B-SPD5-MCP-PylRS^{AF} | mCherry^{185TAG}-2xMS2•GFP^{39TAG} | HEK293T |
| FRB-CD28-FUS-PylRS^{AA}•FRB-CD28-EWSR1-MCP | mCherry^{185TAG}-2xMS2•GFP^{39TAG} | HEK293T |
| FRB-CD28-FUS-PylRS^{AA}•FRB-CD28-EWSR1-4xλ_{N22} | mCherry^{185TAG}-4xBoxB•GFP^{39TAG} | HEK293T |
| FRB-CD28-FUS-PylRS^{AF}•FRB-CD28-EWSR1-MCP | mCherry^{185TAG}-2xMS2•GFP^{39TAG} | HEK293T |
| FRB-CD28-FUS-PylRS^{AF}•FRB-CD28-EWSR1-4xλ_{N22} | mCherry^{185TAG}-4xBoxB•GFP^{39TAG} | HEK293T |
| FUS-CD28-FUS-PylRS^{AA}•FUS-CD28-EWSR1-MCP | mCherry^{185TAG}-2xMS2•GFP^{39TAG} | HEK293T |
| | mCherry^{185TAG}-4xBoxB•GFP^{39TAG}-2xMS2 | |
| FUS-CD28-FUS-PylRS^{AA}•FUS-CD28-EWSR1-4xλ_{N22} | mCherry^{185TAG}-4xBoxB•GFP^{39TAG} | HEK293T |
| | mCherry^{185TAG}-4xBoxB•GFP^{39TAG}-2xMS2 | |
| FUS-CD28-FUS-PylRS^{AF}•FUS-CD28-EWSR1-MCP | mCherry^{185TAG}-2xMS2•GFP^{39TAG} | HEK293T |
| FUS-CD28-FUS-PylRS^{AF}•FUS-CD28-EWSR1-4xλ_{N22} | mCherry^{185TAG}-4xBoxB•GFP^{39TAG} | HEK293T |
| FRB-CD28-FUS-MCP-PylRS^{AA} | mCherry^{185TAG}-2xMS2•GFP^{39TAG} | HEK293T |
| | mCherry^{185TAG}-4xBoxB•GFP^{39TAG}-2xMS2 | |
| FRB-CD28-FUS-MCP-PylRS^{AF} | mCherry^{185TAG}-2xMS2•GFP^{39TAG} | HEK293T |
| | mCherry^{185TAG}-4xBoxB•GFP^{39TAG}-2xMS2 | |
| FUS-CD28-FUS-MCP-PylRS^{AF} | mCherry^{185TAG}-2xMS2•GFP^{39TAG} | HEK293T |
| | mCherry^{185TAG}-4xBoxB•GFP^{39TAG}-2xMS2 | |
| FUS-CD28-FUS-MCP-PylRS^{AA} | mCherry^{185TAG}-2xMS2•GFP^{39TAG} | HEK293T |
| KIF16B-FUS-MCP-PylRS^{AF} | mCherry^{185TAG}-2xMS2•GFP^{39TAG} | HEK293T/COS-7 |
| | mCherry^{185TAG}-4xBoxB•GFP^{39TAG}-2xMS2 | |
| | GFP^{39TAG}-2xMS2•mCherry^{185TAG} | |
| KIF13A-FUS-MCP-PylRS^{AF} | mCherry^{185TAG}-2xMS2•GFP^{39TAG} | HEK293T |
| TOM20-FUS-V5-PylRS^{AF}•TOM20-EWSR1-HA-MCP | mCherry^{185TAG}-2xMS2•GFP^{39TAG} | HEK293T |
| TOM20-FUS-V5-PylRS^{AF}•TOM20-EWSR1-Myc-4xλ_{N22} | mCherry^{185TAG}-4xBoxB•GFP^{39TAG} | HEK293T |
| TOM20-FUS-V5-PylRS^{AA}•TOM20-EWSR1-HA-MCP | mCherry^{185TAG}-2xMS2•GFP^{39TAG} | HEK293T |
| TOM20-FUS-V5-PylRS^{AA}•TOM20-EWSR1-Myc-4xλ_{N22} | mCherry^{185TAG}-4xBoxB•GFP^{39TAG} | HEK293T |
| TOM20-FUS-V5-PylRS^{AAAF}•TOM20-EWSR1-HA-MCP | mCherry^{185TAG}-2xMS2•GFP^{39TAG} | HEK293T |
| TOM20-FUS-V5-PylRS^{AAAF}•TOM20-EWSR1-Myc-4xλ_{N22} | mCherry^{185TAG}-4xBoxB•GFP^{39TAG} | HEK293T |
| KIF16B-VSV-G-FUS-PylRS^{AF}•KIF16B-EWSR1-MCP | mCherry^{185TAG}-2xMS2•GFP^{39TAG} | HEK293T |
| KIF16B-VSVG-FUS-PylRS^{AF}•KIF16B- | mCherry^{185TAG}-2xpp7•GFP^{39TAG} | HEK293T |
| EWSR1-2xPCP | | |
| KIF16B-VSVG-FUS-PylRS^{AF}•KIF16B- | mCherry^{185TAG}-4xpp7•GFP^{39TAG} | HEK293T |
| EWSR1-2xPCP | | |
| KIF16B-VSVG-FUS-PylRS^{AF}•KIF16B- | mCherry^{185TAG}-6xpp7•GFP^{39TAG} | HEK293T |
| EWSR1-2xPCP | | |

### Example 12—Further OT Systems

[0645] In addition to the OT systems described in the preceding examples, a variety of similar OT systems were tested, differing with respect to the mRNA targeting components, and were found to allow for selective orthogonal translation of the reporter (i.e. the POI). A summary of these experiments is shown in the Table 2 below. The results are shown in FIGS. 7A, B and C. The cytoplasmic NES-PylRS system as previously described by Nikic et al. (Angew Chem Int Ed Engl 2016, 55(52):16172-16176) was used as a nonspecific reference (negative control). All experiments were performed in presence of the codon-specific tRNA^{Pyl} and PylRS mutant corresponding ncAAs.

TABLE 2
Tested OT systems

| Fusion protein(s) | | |
|---|---|---|
| comprising O-RS and | | cell |
| RNA-TP segments | Reporter (POI) | lines |
| EBAG9₁₋₂₉::FUS::PylRS•EBAG9₁₋₂₉:: | mCherry^{190TAG}- | HEK293T |
| EWSR1::4xλ_{N22} | 4xBoxB•GFP^{39TAG} | |
| EBAG9₁₋₂₉::FUS::PylRS• EBAG9₁₋₂₉:: | mCherry^{190TAG}- | HEK293T |
| EWSR1::MCP | 2xMS2•GFP^{39TAG} | |
| EBAG9₁₋₂₉::FUS::PylRS • EBAG9₁₋₂₉:: | mCherry^{190TAG}- | HEK293T |
| EWSR1::2xPCP | 2xpp7•GFP^{39TAG} | |

[0646] The results are shown in FIGS. 7A, B and C.

### Example 13—Further OT Fusion Constructs Tested

[0647] In addition to the OT systems described in the preceding examples, a variety of other OT fusion constructs were prepared and tested and found to allow for selective orthogonal translation of the reporter (i.e. the POI). A summary of the tested constructs is shown in the Table 3 below. Unless noted otherwise, the cytoplasmic NES-PylRS system as previously described by Nikic et al. (Angew Chem Int Ed Engl 2016, 55(52):16172-16176) but with the corresponding AF, AA or AAAF mutations, or one of the Pyl RS mutants CpkRS, CbzRS, IFRS1 und OMeRS was used as a nonspecific reference (negative control).

[0648] All experiments were performed in the presence of the codon specific tRNA^{Pyl} and PylRS mutant corresponding noncanoncial amino acids [for example CpkRS with cyclopropene-L-Lysine, CbzRS with N(epsilon)-Benzyloxycarbonyl-L-lysine, IFRS-1 with 3-Iodo-L-phenylalanine, OMeRS with 4-Methoxy-L-phenylalanine)].

[0649] All constructs were tested with a respective reporter ms2-loops for MCP, boxB-loops for λ_{N22}, pp7-loops for PCP.

[0650] In all fusion constructs the synthetases should be freely interchangeable.

[0651] For the SYNZIP constructs it is important to note that SYNZIP1 forms a pair with SYNZIP2 and SYNZIP3 forms a pair with SYNZIP4. In principle all other described SYNZIPs should work similarly (pubs.acs.org/doi/pdf/10.1021/ja907617a).

TABLE 3
Tested OT fusion constructs

| | AA |
|---|---|
| | SEQ |
| Fusion proteins comprising | ID |
| O-RS or RNA-TP segments | NO: |
| EBAG9₁₋₂₉::FUS::PylRS(AF) | 320 |
| EBAG9::PylRS(AF) | 322 |
| EBAG9::FUS::PylRS(AF) | 324 |
| EBAG9::MCP | 326 |
| EBAG9::EWSR1::MCP | 328 |
| EBAG9₁₋₂₉::PylRS(AF) | 330 |
| EBAG9₁₋₂₉::FUS::PylRS(AF) | 332 |
| EBAG9₁₋₂₉::MCP | 334 |
| EBAG9₁₋₂₉::EWSR1::MCP | 336 |
| EBAG9::EWSR1::4xλ_{N22} | 338 |
| EBAG9₁₋₂₉::EWSR1::4xλ_{N22} | 340 |
| EBAG9::PylRS(AA) | 342 |
| EBAG9::PylRS(AAAF) | 344 |
| EBAG9::FUS::PylRS(AA) | 346 |
| EBAG9::FUS::PylRS(AAAF) | 348 |
| EBAG9₁₋₂₉::FUS::PylRS(AA) | 350 |
| EBAG9₁₋₂₉::FUS::PylRS(AAAF) | 352 |
| EBAG9₁₋₂₉::FUS::MCP::PylRS(AF) | 354 |
| CG1::PylRS(AF) | 356 |
| CG1::PylRS(AA) | 358 |
| CG1::PylRS(AAAF) | 360 |
| CG1::FUS::PylRS(AA) | 362 |
| CG1::FUS::PylRS(AAAF) | 364 |
| CG1::MCP | 366 |
| CG1::EWSR1::MCP | 368 |
| CG1::FUS::PylRS(AF) | 370 |
| CG1::FUS::MCP::PylRS(AF) | 372 |
| CMP-SaTr::PylRS(AF) | 374 |
| CMP-SaTr::PylRS(AA) | 376 |
| CMP-SaTr::PylRS(AAAF) | 378 |
| CMP-SaTr::FUS::PylRS(AA) | 380 |
| CMP-SaTr::FUS::PylRS(AAAF) | 382 |
| CMP-SaTr::MCP | 384 |
| CMP-SaTr::EWSR1::MCP | 386 |
| CMP-SaTr::PylRS(AF)EWSR1::4xλ_{N22} | 388 |
| CMP-SaTr::FUS::PylRS(AF) | 390 |
| P450 2C1₁₋₂₇::PylRS(AF) | 392 |
| P450 2C1₁₋₂₇::MCP | 394 |
| P450 2C1₁₋₂₇::FUS::PylRS(AF) | 396 |
| P450 2C1₁₋₂₇::EWSR1::MCP | 398 |
| P450 2C1₁₋₂₇::FUS::MCP::PylRS(AF) | 400 |
| P450 2C1₁₋₂₉::FUS::MCP::PylRS(AF) | 402 |
| EB1::PylRS(AF) | 404 |
| EB1::PylRS(AA) | 406 |
| EB1::PylRS(AAAF) | 408 |
| EB1::FUS::PylRS(AA) | 410 |
| EB1::FUS::PylRS(AAAF) | 412 |
| EB1::MCP | 414 |
| EB1::EWSR1::MCP | 416 |
| EB1::EWSR1::4xλ_{N22} | 418 |
| EB1::FUS::PylRS(AF) | 420 |
| EB1::FUS::MCP::PylRS(AF) | 422 |
| TOM20::FUS::PCP::PylRS(AF) | 424 |
| TOM20::FUS::2xPCP::PylRS(AF) | 426 |
| TOM20::FUS::4xλ_{N22}::PylRS(AF) | 428 |
| LCK::FUS::2xPCP::CbzRS | 430 |
| LCK::FUS::PCP::CbzRS | 432 |
| TOM20::FUS::CbzRS | 434 |
| TOM20::FUS::2xPCP::CbzRS | 436 |
| TOM20::FUS::4xλ_{N22}::CbzRS | 438 |
| EBAG9₁₋₂₉::FUS::PCP::PylRS(AF) | 440 |
| EBAG9₁₋₂₉::FUS::4xλ_{N22}::IFRS1 | 442 |
| KIF16B::EWSR1::Myc::2xPCP | 444 |
| KIF16B::EWSR1::HA::2xPCP | 446 |
| EBAG9₁₋₂₉::EWSR1::Myc::2xPCP | 448 |
| EBAG9₁₋₂₉::EWSR1::HA::2xPCP | 450 |
| LCK::CbzRS | 452 |
| LCK::FUS::CbzRS | 454 |
| TOM20::FUS::SYNZIP1::CpkRS | 456 |
| KIF16B::FUS::CbzRS | 458 |
| EBAG9₁₋₂₉::FUS::CpkRS | 460 |
| TOM20::FUS::CbzRS | 462 |
| EBAG9₁₋₂₉::FUS::CbzRS | 464 |
| TOM20::FUS::SYNZIP1::CbzRS | 466 |
| KIF16B::FUS::CpkRS | 468 |
| LCK::FUS::CpkRS | 470 |
| LCK::CpkRS | 472 |
| TOM20::FUS::SYNZIP3::CbzRS | 474 |
| TOM20::FUS::SYNZIP3::CpkRS | 476 |
| TOM20::EWSR1::PylRS(AA)::FUS::PylRS(AA) | 478 |
| LCK::PylRS(AF)::FUS::PylRS(AF) | 480 |
| LCK::FUS::PylRS(AF)::EWSR1::PylRS(AF) | 482 |
| LCK::FUS::PylRS(AF)::FUS::PylRS(AF) | 484 |
| TOM20::FUS::PylRS(AF)::EWSR1::PylRS(AF) | 486 |
| TOM20::FUS::PylRS(AF)::FUS::PylRS(AF) | 488 |
| TOM20::EWSR1::4xλ_{N22}::PylRS(AA)::FUS::PylRS(AA) | 490 |
| LCK::EWSR1::MCP::PylRS(AA)::FUS::PylRS(AA) | 492 |
| LCK::PylRS(AA)::FUS::PylRS(AA) | 494 |
| LCK::PylRS(AF)::EWSR1::PylRS(AF) | 496 |
| TOM20::FUS::MCP::PylRS(AF)::EWSR1::PylRS(AF) | 498 |
| TOM20::FUS::4xλ_{N22}::PylRS(AF)::EWSR1::PylRS(AF) | 500 |
| TOM20::FUS::SYNZIP1::MCP::PylRS(AF)::EWSR1::PylRS(AF) | 502 |
| TOM20::FUS::SYNZIP2::MCP::PylRS(AF)::EWSR1::PylRS(AF) | 504 |
| LCK::FUS::SYNZIP1::MCP::PylRS(AF)::EWSR1::PylRS(AF) | 506 |
| LCK::FUS::SYNZIP2::MCP::PylRS(AF)::EWSR1::PylRS(AF) | 508 |
| LCK::PylRS(AA)::EWSR1::PylRS(AA) | 510 |
| LCK::FUS::PylRS(AA)::EWSR1::PylRS(AA) | 512 |
| TOM20::FUS::PylRS(AA)::EWSR1::PylRS(AA) | 514 |
| TOM20::FUS::MCP::PylRS(AA)::EWSR1::PylRS(AA) | 516 |
| TOM20::FUS::4xλ_{N22}::PylRS(AA)::EWSR1::PylRS(AA) | 518 |
| LCK::EWSR1::MCP::PylRS(AF)::FUS::PylRS(AF) | 520 |
| TOM20::EWSR1::4xλ_{N22}::PylRS(AF)::FUS::PylRS(AF) | 522 |
| TOM20::EWSR1::MCP::PylRS(AF)::FUS::PylRS(AF) | 524 |
| LCK::PylRS(AA)::FUS::PylRS(AA) | 526 |
| EBAG9₁₋₂₉::EWSR1::SYNZIP4::4xλ_{N22} | 528 |
| KIF16B::FUS::SYNZIP1::PylRS(AF) | 530 |
| KIF16B::FUS::SYNZIP!::PylRS(AA) | 532 |
| EBAG9₁₋₂₉::EWSR1::SYNZIP2::MCP | 534 |
| TOM20::EWSR1::SYNZIP2::MCP | 536 |
| TOM20::FUS::SYNZIP4::4xλ_{N22}::PylRS(AA) | 538 |
| KIF16B::EWSR1::SYNZIP4::4xλ_{N22} | 540 |
| TOM20::EWSR1::SYNZP4::4xλ_{N22} | 542 |
| TOM20::FUS::SYNZIP1::PylRS(AF) | 544 |
| TOM20::FUS::SYNZIP::3::PylRS(AF) | 546 |
| EBAG9₁₋₂₉::FUS::SYNZIP1::PylRS(AF) | 548 |
| EBAG9₁₋₂₉::FUS::SYNZIP3::PylRS(AF) | 550 |
| TOM20::FUS::SYNZIP1::PylRS(AA) | 552 |
| TOM20::FUS::SYNZIP3::PylRS(AA) | 554 |
| TOM20::FUS::SYNZIP3::PylRS(AAAF) | 556 |
| LCK::FUS::SYNZIP3::PylRS(AF) | 558 |
| LCK::SYNZIP1::PylRS(AF) | 560 |
| LCK::SYNZIP3::PylRS(AF) | 562 |
| SYNZIP2::MCP | 564 |
| LCK::EWSR1::SYNZIP2::MCP | 566 |
| LCK::EWSR1::SYNZIP4::4xλ_{N22} | 568 |
| LCK::SYNZIP2::MCP | 570 |
| EWSR1::SYNZIP2::MCP | 572 |
| LCK::FUS::SYNZIP1::PylRS(AF) | 574 |
| LCK::FUS::SYNZIP3::PylRS(AF) | 576 |
| TOM20::EWSR1::SYNZIP4::2xPCP | 578 |
| TOM20::EWSR1::SYNZIP2::2xPCP | 580 |
| KIF16B::EWSR1::SYNZIP2::MCP | 582 |
| LCK::SYNZIP1::PylRS(AF) | 584 |
| LCK::FUS::SYNZIP1::PylRS(AF) | 586 |
| SYNZIP4::4xλN22 | 588 |
| TOM20::FUS::SYNZIP1::MCP::PylRS(AF) | 590 |
| TOM20::FUS::SYNZIP2::MCP::PylRS(AF) | 592 |
| TOM20::FUS::SYNZIP1::MCP::PylRS(AA) | 594 |
| TOM20::FUS::SYNZIP2::MCP::PylRS(AA) | 596 |
| TOM20::FUS::SYNZIP::MCP::IFRS1 | 598 |
| TOM20::FUS::SYNZIP2::MCP::IFRS1 | 600 |
| TOM20::FUS::SYNZIP3::4xλ_{N22}::CbzRS | 602 |
| EBAG9₁₋₂₉::FUS::SYNZIP3::PCP::PylRS(AF) | 604 |
| EBAG9₁₋₂₉::FUS::SYNZIP4::PylRS(AF) | 606 |
| EBAG9₁₋₂₉::FUS::SYNZIP3::4xλ_{N22}::IFRS1 | 608 |
| LCK::FUS::SYNZIP1::MCP::PylRS(AF) | 610 |
| LCK::FUS::SYNZIP2::MCP::PylRS(AF) | 612 |
| CG1::FUS::SYNZIP1::MCP::PylRS(AF) | 614 |
| CG1::FUS::SYNZIP2::MCP::PylRS(AF) | 616 |
| TOM20::FUS::SYNZIP4::λ_{N22}::CbzRS | 618 |
| EBAG9₁₋₂₉::FUS::SYNZIP4::4xλ_{N22}::IFRS1 | 620 |
| TOM20::FUS::SYNZIP3::4xλ_{N22}::PylRS(AA) | 622 |
| LCK::FUS::SYNZIP1::MCP::PylRS(AA) | 624 |
| TOM20::EWSR1::SYNZIP4::4xλ_{N22}::SYNZIP4::PylRS(AF) | 626 |
| TOM20::FUS::SYNZIP1::MCP::SYNZIP1::PylRS(AF) | 628 |
| TOM20::EWSR1::SYNZIP4::4xλ_{N22}::SYNZIP4::PylRS(AA) | 630 |
| TOM20::FUS::SYNZIP3::4xλ_{N22}::SYNZIP3::PylRS(AA) | 632 |
| LCK::EWSR1::SYNZIP4::4xλ_{N22}::SYNZIP4::PylRS(AF) | 634 |
| LCK::FUS::SYNZIP3::4xλ_{N22}::SYNZIP3::PylRS(AF) | 636 |
| TOM20::FUS::SYNZIP3::4xλ_{N22}::SYNZIP3::PylRS(AF) | 638 |
| TOM20::EWSR1::SYNZIP2::MCP::SYNZIP2::PylRS(AF) | 640 |
| LCK::OMeRS | 642 |
| TOM20::FUS::OMeRS | 644 |
| KIF16B::FUS::OMeRS | 646 |
| LCK::FUS::OMeRS | 648 |
| EBAG9₁₋₂₉:FUS::OMeRS | 650 |
| TOM20::FUS::SYNZIP1::OMeRS | 652 |
| TOM20::FUS::SYNZIP3::OMeRS | 654 |
| SLP3::FUS::PylRS(AF) | 656 |
| SLP3::MCP | 658 |
| SLP3::EWSR1::MCP | 660 |
| SLP3::EWSR1::4xλ_{N22} | 662 |
| SLP3::PylRS(AF) | 664 |
| TOM20::FUS::MCP::PylRS(AF) | 666 |
| KIF16B::1xLAF-1::PylRS(AF) | 668 |
| KIF16B::1xLAF-1::MCP | 670 |
| KIF16B::1xLAF-1::2xPCP | 672 |
| KIF16B::2xLAF-1::2xPCP | 674 |
| KIF16B::2xLAF-1::PylRS(AF) | 676 |
| KIF16B::2xLAF-1::MCP | 678 |

AA: amino acid sequence

### Abbreviations

[0652] “-” or Symbols representing a peptidic linkage
[0653] “⋅” Symbol representing a combination of polypeptides
[0654] AP polypeptide segment acting as assembler
[0655] AFP assembler fusion protein
[0656] BSA bovine serum albumin
[0657] BoxB lambda phase RNA stem-loop, specific binding site of λ_{N22}
[0658] CbzRS Methanosarcina mazei PylRS (Y306M, L309G, C348T)
[0659] CDS (en-)coding sequence
[0660] CG1 CG1 (Nup42) nucleoporin protein for targeting to nuclear membrane
[0661] CMPSiaTr CMP sialic acid transporter for targeting to Golgi membrane
[0662] CpkRS Methanosarcina mazei PylRS (A302S
[0663] EB1 EB1 protein for targeting to microtubule plus ends
[0664] EBAG9 Receptor-binding cancer antigen expressed on SiSo cells
[0665] EBAG9_{FL} EBAG9 full length protein for targeting to Golgi membrane
[0666] EBAG9₁₋₂₉ EBAG9 amino acid residues 1-29 (N-terminal) for targeting to Golgi membrane
[0667] EGFP^{149TAG} enhanced green fluorescent protein, amino acid position 149 encoded by Amber codon (TAG)
[0668] EP polypeptide segment acting as an effector
[0669] ER Endoplasmatic Reticulum
[0670] EWSR1 Ewing sarcoma breakpoint region 1 (also termed EWS herein)
[0671] FBS fetal bovine serum
[0672] FFC fluorescence flow cytometry
[0673] FISH fluorescence in situ hybridization
[0674] FRB-CD28 synthetic membrane targeting domain derived from transmembrane proteins CD4, FRB (similar to mTOR) and CD28
[0675] FSC-A forward scatter area
[0676] FUS fused-in sarcoma
[0677] FUS-CD28 (synthetic membrane targeting fusion polypeptide derived from CD4, FUS and CD28
[0678] GCE genetic code expansion
[0679] GFP green fluorescent protein
[0680] GFP^{39TAA} green fluorescent protein, amino acid position 39 encoded by Ochre codon (TAA)
[0681] GFP^{39TAG} green fluorescent protein, amino acid position 39 encoded by Amber codon (TAG)
[0682] GFP^{39TGA} green fluorescent protein, amino acid position 39 encoded by Opal codon (TGA)
[0683] GFP^{39,149TAG} green fluorescent protein, each of amino acid positions 39 and 149 encoded by Amber codon (TAG)
[0684] GFP^{39,149,182TAG} green fluorescent protein, each of amino acid positions 39, 149 and 182 encoded by Amber codon (TAG)
[0685] IC-TP intracellular targeting polypeptide
[0686] IDP intrinsically disordered protein
[0687] IFRS1 Methanosarcina mazei PylRS (L305M, Y306L, L309S, N346S, C348M)
[0688] INSR insulin receptor
[0689] INSR^{676TAG} insulin receptor, amino acid position 676 encoded by Amber codon (TAG)
[0690] iRFP near-infrared fluorescent protein
[0691] KIF13A kinesin family member 13A—Unless specified otherwise herein, “KIF13A” specifically refers to the fragment covering amino acid residues 1-411 of KIF13A wherein P390 is deleted (KIF13A_{1-411,ΔP390}).
[0692] KIF16B kinesin family member 16B—Unless specified otherwise herein, “KIF16B” specifically refers to the fragment covering amino acid residues 1-400 of KIF16B (KIF16B₁₋₄₀₀).
[0693] λ_{N22} 22 amino acid RNA-binding domain of lambda phage antiterminator protein N
[0694] LcK posttranslational modification site for plasma membrane targeting of lymphocyte-specific protein tyrosine kinase
[0695] mCherry^{185TAG} mCherry, amino acid position 185 encoded by Amber codon (TAG)
[0696] MCP MS2 bacteriophage coat protein
[0697] MLC membrane-less compartment
[0698] MS2 Enterobacteria phage MS2
[0699] MS2-tag two MS2 RNA stem-loops fused to the 3′ untranslated region of the mRNA (or coding sequence therefor)
[0700] ms2 MS2-tag
[0701] ncAA non-canonical amino acid
[0702] NLS nuclear localization sequence
[0703] Nup153 nucleoporin 153
[0704] O-RS orthogonal aminoacyl tRNA synthetase
[0705] OMeRS Methanosarcina mazei PyrRS (A302T, Y384F, N346V, C348W, V401L)
[0706] OT assembly spatially enriched components of the GCE machinery in a membrane-less assembly that is able to act as an artificial orthogonally translating (OT) organelle
[0707] P450 2C1₁₋₂₇ P450 2C1 residues 1-27 (N-terminal) for targeting of ER membranes
[0708] PBS phosphate buffered saline
[0709] PCP Bacteriophage coat protein for targeting to pp7 loop tag
[0710] PEI polyethylenimine
[0711] POI polypeptide of interest (=target polypeptide)
[0712] POI^{TAG} POI comprising an Amber-(TAG-)encoded amino acid residue (or coding sequence therefor)
[0713] pp7 pp7 loop tag from RNA bacteriophage pp7
[0714] PSP phase separation polypeptide
[0715] PylRS pyrrolysyl tRNA synthetase
[0716] PylRS^{AA} mutant M. mazei pyrrolysyl tRNA synthetase comprising amino acid substitutions N346A and C348A
[0717] PylRS^{AF} mutant M. mazei pyrrolysyl tRNA synthetase comprising amino acid substitutions Y306A and Y384F
[0718] PylRS^{AAF} mutant M. mazei pyrrolysyl tRNA synthetase comprising amino acid substitutions Y306A, N346A, C348A and Y384F
[0719] RNA-TP RNA targeting polypeptide
[0720] RS aminoacyl tRNA synthetase
[0721] RT room temperature
[0722] SCO cyclooctyne lysine
[0723] SEM standard error of the mean
[0724] SSC saline-sodium citrate (buffer)
[0725] SSC-A side scatter area
[0726] SSC-W side scatter width
[0727] SPD5 spindle-defective protein 5
[0728] SYNZIP1 Synthetic coiled coil peptide 1
[0729] SYNZIP2 Synthetic coiled coil peptide 2
[0730] SYNZIP3 Synthetic coiled coil peptide 3
[0731] SYNZIP4 Synthetic coiled coil peptide 4
[0732] TOMM20 translocase of outer mitochondrial membrane 20
[0733] TOMM20₁₋₇₀ fragment covering amino acid residues 1-70 of TOMM20
[0734] tRNA^{Pyl} tRNA that is coupled to pyrrolysyl or another non-canonical amino acid residue by a wild-type or modified PylRS and has an anticodon that, for site-specific incorporation of a (non-canonical) amino acid residue into a POI, is preferably the reverse complement of a selector codon. The tRNA^{Pyl} used in the examples carried the anticodon against the stop codon Amber (tRNA^{Pyl,CUA}), Ochre (tRNA^{Pyl,UUA}) or Opal (tRNA^{Pyl,UCA}) depending on which of these was used as selector codon in the POI-encoding sequence.
[0735] 3′ UTR 3′ untranslated region
[0736] Vim^{116TAG} Vimentin, amino acid position 116 encoded by Amber codon (TAG)

### Sequences

[0737] The following sections show the sequences of the polypeptides and polynucleotides described herein.

[0738] Nucleic acid sequences are stated in 5′ to 3′ orientation, protein sequences are stated from N- to C-terminus.

Lengthy table referenced here
US20230098002A1-20230330-T00001
Please refer to the end of the specification for access instructions.

LENGTHY TABLES
The patent application contains a lengthy table section. A copy of the table is available in electronic form from the USPTO web site (https://seqdata.uspto.gov/?pageRequest=docDetail&DocID=US20230098002A1). An electronic copy of the table will also be available from the USPTO upon request and payment of the fee set forth in 37 CFR 1.19(b)(3).

1-15. (canceled)

16. An assembler fusion protein (AFP) comprising:
(a) at least one first polypeptide segment acting as assembler (AP) that is selected from:
(a1) a polypeptide segment derived from an intracellular targeting polypeptide (IC-TP segment), wherein said intracellular targeting polypeptide targets, and thus becomes locally enriched at, an intracellular structural element within or directly adjacent to the cytoplasm; and
(a2) a polypeptide segment derived from a phase separation polypeptide (PSP segment), wherein said phase separation polypeptide has the ability to undergo self-association in the cytoplasm of a cell so as to create sites of high local concentration in the cytoplasm, and
(b) at least one second polypeptide segment acting as an effector (EP) that is selected from:
b1) an RNA-targeting polypeptide (RNA-TP) segment, and
b2) an orthogonal aminoacyl tRNA synthetase (O-RS) segment;
wherein said polypeptide segments are functionally linked in said AFP.

17. An assembler fusion protein (AFP) combination comprising at least two AFPs of claim 16.

18. A fusion protein (RNA-TP/O-RS fusion protein) comprising:
(i) at least one RNA-targeting polypeptide (RNA-TP) segment; and
(ii) at least one orthogonal aminoacyl tRNA synthetase (O-RS) segment,
wherein said polypeptide segments are functionally linked in said RNA-TP/O-RS fusion protein.

19. A nucleic acid molecule, or a combination of two or more nucleic acid molecules, comprising:
(i) a nucleotide sequence that encodes at least one AFP of claim 16, or at least one AFP combination of at least two AFPs of claim 16, or
(ii) a nucleic acid sequence complementary to the nucleotide sequence of (i), or
(iii) both of (i) and (ii).

20. A nucleic acid molecule, or a combination of two or more nucleic acid molecules, comprising:
(i) a nucleotide sequence that encodes at least one RNA-TP/O-RS fusion protein of claim 18, or
(ii) a nucleic acid sequence complementary to (i), or
(iii) both of (i) and (ii).

21. An expression cassette comprising the nucleotide sequence of the nucleic acid molecule, or the combination of nucleic acid molecules of claim 19.

22. An expression cassette comprising the nucleotide sequence of the nucleic acid molecule, or the combination of nucleic acid molecules of claim 20.

23. An expression vector comprising at least one expression cassette of claim 21.

24. An expression vector comprising at least one expression cassette of claim 22.

25. A cell comprising at least one nucleic acid molecule, or combination of nucleic acid molecules, of claim 19.

26. A cell comprising at least one nucleic acid molecule, or combination of nucleic acid molecules of claim 20.

27. A method for preparing a polypeptide of interest (POI) comprising in its amino acid sequence one or more non-canonical amino acid (ncAA) residues, wherein the method comprises expressing the POI in a cell in the presence of said one or more ncAAs, wherein the cell comprises:
(i) a POI-encoding nucleotide sequence (CS^{POI}) wherein said one or more ncAA residues of the POI are encoded by selector codon(s),
(ii) a targeting nucleotide sequence (TN) that is functionally linked to the CS^{POI} and is able to interact with an RNA-TP segment of at least one of the AFPs in the cell;
(iii) one or more orthogonal tRNA^{ncAA} (O-tRNA^{ncAA}) molecules which carry the anticodon(s) complementary to the selector codon(s) of the CS^{POI}, and wherein said O-tRNA^{ncAA} molecules together with one or more O-RS segments of at least one of the AFPs in the cell form one or more orthogonal O-RS/O-tRNA^{ncAA} pairs which allow for the introduction of said one or more ncAA residues into the amino acid sequence of the POI;
and wherein the method optionally further comprises recovering the expressed POI.

28. A method for preparing a polypeptide of interest (POI) comprising in its amino acid sequence one or more non-canonical amino acid (ncAA) residues, wherein the method comprises expressing the POI in a cell in the presence of said one or more ncAAs, wherein the cell comprises:
(i) a POI-encoding nucleotide sequence (CS^{POI}) wherein said one or more ncAA residues of the POI are encoded by selector codon(s),
(ii) a targeting nucleotide sequence (TN) that is functionally linked to the CS^{POI} and is able to interact with an RNA-TP segment of at least one of the RNA-TP/O-RS fusion proteins in the cell;
(iii) one or more orthogonal tRNA^{ncAA} (O-tRNA^{ncAA}) molecules which carry the anticodon(s) complementary to the selector codon(s) of the CS^{POI}, and wherein said O-tRNA^{ncAA} molecules together with one or more O-RS segments of the RNA-TP/O-RS fusion proteins in the cell form one or more orthogonal O-RS/O-tRNA^{ncAA} pairs which allow for the introduction of said one or more ncAA residues into the amino acid sequence of the POI;
and wherein the method optionally further comprises recovering the expressed POI.

29. A nucleic acid molecule comprising:
(i) a nucleotide sequence (CSP^{POI}) that encodes a polypeptide of interest (POI), said POI comprising one or more non-canonical amino acid (ncAA) residues which are encoded in the CS^{POI} by selector codons, and
(ii) a targeting nucleotide sequence (TN), wherein an RNA molecule comprising said TN is able to interact via said TN with an RNA-targeting polypeptide (RNA-TP).

30. A kit for preparing a polypeptide of interest (POI) having at least one non-canonical amino acid (ncAA) residue, the kit comprising:
at least one ncAA, or salt thereof, corresponding to the at least one ncAA residue of the POI, and
at least one expression vector of claim 23.

31. A kit for preparing a polypeptide of interest (POI) having at least one non-canonical amino acid (ncAA) residue, the kit comprising:
at least one ncAA, or salt thereof, corresponding to the at least one ncAA residue of the POI, and
at least one expression vector of claim 24.

The application's sequence listing, which the Patent Office published only in electronic form, follows.

SEQUENCE LISTING (685 sequences)

SEQ ID NO: 1 - DNA, 36 bp, Artificial Sequence
  Description of Artificial Sequence: Synthetic oligonucleotide
  Hybridization probe for tRNA Pyl labelled at the 5' terminus with Cy5
ctaacccggctgaacggatttagagtccattcgatc

SEQ ID NO: 2 - DNA, 36 bp, Artificial Sequence; identical to SEQ ID NO: 1
  Description of Artificial Sequence: Synthetic oligonucleotide
  Hybridization probe for tRNA Pyl labelled at the 5' terminus with digoxigenin

SEQ ID NO: 3 - DNA, 31 bp, Artificial Sequence
  Description of Artificial Sequence: Synthetic oligonucleotide
  Hybridization probe for the MS2 RNA stem-loop sequence labelled at the 5' terminus with Alexa Fluor 647
ctgcagacatgggtgatcctcatgttttcta

SEQ ID NO: 4 - DNA, 69 bp, Methanosarcina mazei
  tRNA Pyl,CUA (pyrrolysyl tRNA of Methanosarcina mazei for Amber codon)
ggaaacctgatcatgtagatcgaatggactctaaatccgttcagccgggttagattcccggggtttccg

SEQ ID NO: 5 - DNA, 69 bp, Methanosarcina mazei
  tRNA Pyl,UCA (pyrrolysyl tRNA of Methanosarcina mazei for Opal codon)
ggaaacctgatcatgtagatcgaatggacttcaaatccgttcagccgggttagattcccggggtttccg

SEQ ID NO: 6 - DNA, 69 bp, Methanosarcina mazei
  tRNA Pyl,UUA (pyrrolysyl tRNA of Methanosarcina mazei for Ochre codon)
ggaaacctgatcatgtagatcgaatggactttaaatccgttcagccgggttagattcccggggtttccg

SEQ ID NO: 7 - DNA, 1416 bp, Methanosarcina mazei
  PylRS AF (Methanosarcina mazei pyrrolysyl tRNA synthetase double mutant: Y306A, Y384F; Uniprot: Q8PWY1)
  CDS (1)..(1416)
atggcgtgcccggtgccgctgcagctgccgccgctggaacgcctgaccctggatgataaaaaaccgctgaataccctgatctctgctactggtctgtggatgagtcgtaccggaaccattcataaaatcaaacaccacgaggttagccgttcgaaaatctatattgagatggcgtgtggcgatcatctggttgtgaacaatagccgctcttctcgtacagcacgtgcactgcgtcaccacaaatatcgtaaaacctgtaaacgttgccgtgtgtccgatgaggatctgaacaaattcctgacaaaagccaatgaggaccaaacaagcgtgaaagtgaaagtcgttagcgctcctacccgtactaaaaaagcaatgccgaaatccgttgctcgtgcccctaaaccactggaaaacactgaagcagcacaggcacagccgtctggaagcaaattctctccggccattcctgtttctacccaggagtccgtttctgttccagcaagtgtgagcaccagcattagcagtattagcaccggtgccaccgctagcgccctggttaaaggcaataccaatccgattacaagcatgtctgccccggttcaagcatcagctccagcactgacaaaatcccaaaccgatcgtctggaggttctgctgaatccgaaagacgaaatcagcctgaattccggcaaaccgtttcgtgaactggagagcgaactgctgtcacgtcgtaaaaaagacctgcaacaaatctatgccgaagaacgtgagaactatctggggaaactggaacgtgaaatcacccgctttttcgtggatcgtggctttctggagatcaaatccccgattctgattcctctggagtatatcgagcgtatgggcatcgacaatgataccgaactgagcaaacaaattttccgtgtggataaaaacttctgtctgcgccctatgctagcaccaaatctggctaactatctgcgcaaactggaccgtgccctgcctgatcctatcaaaatcttcgagatcggcccgtgttatcgtaaagagtccgacggtaaagaacatctggaggagtttaccatgctgaacttttgccaaatgggttcaggttgtactcgtgagaacctggaaagcatcatcaccgattttctgaaccacctgggcattgacttcaaaattgtgggcgacagctgtatggtgtttggcgacaccctggatgtcatgcacggcgacctggaactgtctagtgccgttgtgggcccaatcccgctggatcgtgagtggggtatcgacaaaccttggatcggtgcgggttttggtctggagcgtctgctgaaagtaaaacacgacttcaagaacatcaaacgtgctgcacgttccgagtcctattacaatggtatttctactaacctgtaa

SEQ ID NO: 8 - protein, 471 aa, Methanosarcina mazei
  PylRS AF (Methanosarcina mazei pyrrolysyl tRNA synthetase double mutant: Y306A, Y384F; Uniprot: Q8PWY1)
MACPVPLQLPPLERLTLDDKKPLNTLISATGLWMSRTGTIHKIKHHEVSRSKIYIEMACGDHLVVNNSRSSRTARALRHHKYRKTCKRCRVSDEDLNKFLTKANEDQTSVKVKVVSAPTRTKKAMPKSVARAPKPLENTEAAQAQPSGSKFSPAIPVSTQESVSVPASVSTSISSISTGATASALVKGNTNPITSMSAPVQASAPALTKSQTDRLEVLLNPKDEISLNSGKPFRELESELLSRRKKDLQQIYAEERENYLGKLEREITRFFVDRGFLEIKSPILIPLEYIERMGIDNDTELSKQIFRVDKNFCLRPMLAPNLANYLRKLDRALPDPIKIFEIGPCYRKESDGKEHLEEFTMLNFCQMGSGCTRENLESIITDFLNHLGIDFKIVGDSCMVFGDTLDVMHGDLELSSAVVGPIPLDREWGIDKPWIGAGFGLERLLKVKHDFKNIKRAARSESYYNGISTNL

SEQ ID NO: 9 - DNA, 1416 bp, Methanosarcina mazei
  PylRS AA (Methanosarcina mazei pyrrolysyl tRNA synthetase double mutant: N346A, C348A; Uniprot: Q8PWY1)
  CDS (1)..(1416)
atggcgtgcccggtgccgctgcagctgccgccgctggaacgcctgaccctggatgacaaaaaaccgctgaataccctgatctctgctactggtctgtggatgagtcgtaccggaaccattcataaaatcaaacaccacgaggttagccgttcgaaaatctatattgagatggcgtgtggcgatcatctggttgtgaacaatagccgctcttctcgtacagcacgtgcactgcgtcaccacaaatatcgtaaaacctgtaaacgttgccgtgtgtccgatgaggatctgaacaaattcctgacaaaagccaatgaggaccaaacaagcgtgaaagtgaaagtcgttagcgctcctacccgtactaaaaaagcaatgccgaaatccgttgctcgtgcccctaaaccactggaaaacactgaagcagcacaggcacagccgtctggaagcaaattctctccggccattcctgtttctacccaggagtccgtttctgttccagcaagtgtgagcaccagcattagcagtattagcaccggtgccaccgctagcgccctggttaaaggcaataccaatccgattacaagcatgtctgccccggttcaagcatcagctccagcactgacaaaatcccaaaccgatcgtctggaggttctgctgaatccgaaagacgaaatcagcctgaattccggcaaaccgtttcgtgaactggagagcgaactgctgtcacgtcgtaaaaaagacctgcaacaaatctatgccgaagaacgtgagaactatctggggaaactggaacgtgaaatcacccgctttttcgtggatcgtggctttctggagatcaaatccccgattctgattcctctggagtatatcgagcgtatgggcatcgacaatgataccgaactgagcaaacaaattttccgtgtggataaaaacttctgtctgcgccctatgctggcaccaaatctgtataactatctgcgcaaactggaccgtgccctgcctgatcctatcaaaatcttcgagatcggcccgtgttatcgtaaagagtccgacggtaaagaacatctggaggagtttaccatgctggcctttgcccaaatgggttcaggttgtactcgtgagaacctggaaagcatcatcaccgattttctgaaccacctgggcattgacttcaaaattgtgggcgacagctgtatggtgtatggcgacaccctggatgtcatgcacggcgacctggaactgtctagtgccgttgttggaccaattccgctggaccgtgagtggggtatcgacaaaccgtggatcggagcaggattcggtctggaacgcctgctgaaagtgaaacacgacttcaaaaacatcaaacgtgccgcccgttctgaatcgtattataacgggatctctacgaacctgtaa

SEQ ID NO: 10 - protein, 471 aa, Methanosarcina mazei
  PylRS AA (Methanosarcina mazei pyrrolysyl tRNA synthetase double mutant: N346A, C348A; Uniprot: Q8PWY1)
MACPVPLQLPPLERLTLDDKKPLNTLISATGLWMSRTGTIHKIKHHEVSRSKIYIEMACGDHLVVNNSRSSRTARALRHHKYRKTCKRCRVSDEDLNKFLTKANEDQTSVKVKVVSAPTRTKKAMPKSVARAPKPLENTEAAQAQPSGSKFSPAIPVSTQESVSVPASVSTSISSISTGATASALVKGNTNPITSMSAPVQASAPALTKSQTDRLEVLLNPKDEISLNSGKPFRELESELLSRRKKDLQQIYAEERENYLGKLEREITRFFVDRGFLEIKSPILIPLEYIERMGIDNDTELSKQIFRVDKNFCLRPMLAPNLYNYLRKLDRALPDPIKIFEIGPCYRKESDGKEHLEEFTMLAFAQMGSGCTRENLESIITDFLNHLGIDFKIVGDSCMVYGDTLDVMHGDLELSSAVVGPIPLDREWGIDKPWIGAGFGLERLLKVKHDFKNIKRAARSESYYNGISTNL

SEQ ID NO: 11 - DNA, 1413 bp, Methanosarcina mazei
  PylRS AAAF (Methanosarcina mazei pyrrolysyl tRNA synthetase quadruple mutant: Y306A, N346A, C348A, Y384F; Uniprot: Q8PWY1)
  CDS (1)..(1413)
gcgtgcccggtgccgctgcagctgccgccgctggaacgcctgaccctggatgataaaaaaccgctgaataccctgatctctgctactggtctgtggatgagtcgtaccggaaccattcataaaatcaaacaccacgaggttagccgttcgaaaatctatattgagatggcgtgtggcgatcatctggttgtgaacaatagccgctcttctcgtacagcacgtgcactgcgtcaccacaaatatcgtaaaacctgtaaacgttgccgtgtgtccgatgaggatctgaacaaattcctgacaaaagccaatgaggaccaaacaagcgtgaaagtgaaagtcgttagcgctcctacccgtactaaaaaagcaatgccgaaatccgttgctcgtgcccctaaaccactggaaaacactgaagcagcacaggcacagccgtctggaagcaaattctctccggccattcctgtttctacccaggagtccgtttctgttccagcaagtgtgagcaccagcattagcagtattagcaccggtgccaccgctagcgccctggttaaaggcaataccaatccgattacaagcatgtctgccccggttcaagcatcagctccagcactgacaaaatcccaaaccgatcgtctggaggttctgctgaatccgaaagacgaaatcagcctgaattccggcaaaccgtttcgtgaactggagagcgaactgctgtcacgtcgtaaaaaagacctgcaacaaatctatgccgaagaacgtgagaactatctggggaaactggaacgtgaaatcacccgctttttcgtggatcgtggctttctggagatcaaatccccgattctgattcctctggagtatatcgagcgtatgggcatcgacaatgataccgaactgagcaaacaaattttccgtgtggataaaaacttctgtctgcgccctatgctagcaccaaatctggctaactatctgcgcaaactggaccgtgccctgcctgatcctatcaaaatcttcgagatcggcccgtgttatcgtaaagagtccgacggtaaagaacatctggaggagtttaccatgctggcctttgcccaaatgggttcaggttgtactcgtgagaacctggaaagcatcatcaccgattttctgaaccacctgggcattgacttcaaaattgtgggcgacagctgtatggtgtttggcgacaccctggatgtcatgcacggcgacctggaactgtctagtgccgttgtgggcccaatcccgctggatcgtgagtggggtatcgacaaaccttggatcggtgcgggttttggtctggagcgtctgctgaaagtaaaacacgacttcaagaacatcaaacgtgctgcacgttccgagtcctattacaatggtatttctactaacctgtaa

SEQ ID NO: 12 - protein, 470 aa, Methanosarcina mazei
  PylRS AAAF (Methanosarcina mazei pyrrolysyl tRNA synthetase quadruple mutant: Y306A, N346A, C348A, Y384F; Uniprot: Q8PWY1)
ACPVPLQLPPLERLTLDDKKPLNTLISATGLWMSRTGTIHKIKHHEVSRSKIYIEMACGDHLVVNNSRSSRTARALRHHKYRKTCKRCRVSDEDLNKFLTKANEDQTSVKVKVVSAPTRTKKAMPKSVARAPKPLENTEAAQAQPSGSKFSPAIPVSTQESVSVPASVSTSISSISTGATASALVKGNTNPITSMSAPVQASAPALTKSQTDRLEVLLNPKDEISLNSGKPFRELESELLSRRKKDLQQIYAEERENYLGKLEREITRFFVDRGFLEIKSPILIPLEYIERMGIDNDTELSKQIFRVDKNFCLRPMLAPNLANYLRKLDRALPDPIKIFEIGPCYRKESDGKEHLEEFTMLAFAQMGSGCTRENLESIITDFLNHLGIDFKIVGDSCMVFGDTLDVMHGDLELSSAVVGPIPLDREWGIDKPWIGAGFGLERLLKVKHDFKNIKRAARSESYYNGISTNL

SEQ ID NO: 13 - DNA, 348 bp, Unknown
  Description of Unknown: Enterobacteria phage MS2 sequence
  MCP (coat protein of Enterobacteria phage MS2)
  CDS (1)..(348)
gcttctaactttactcagttcgttctcgtcgacaatggcggaactggcgacgtgactgtcgccccaagcaacttcgctaacgggatcgctgaatggatcagctctaactcgcgttcacaggcttacaaagtaacctgtagcgttcgtcagagctctgcgcagaatcgcaaatacaccatcaaagtcgaggtgcctaaaggcgcctggcgttcgtacttaaatatggaactaaccattccaattttcgccacgaattccgactgcgagcttattgttaaggcaatgcaaggtctcctaaaagatggaaacccgattccctcagcaatcgcagcaaactccggcatctac

SEQ ID NO: 14 - protein, 116 aa, Unknown
  Description of Unknown: Enterobacteria phage MS2 sequence
  MCP (coat protein of Enterobacteria phage MS2)
ASNFTQFVLVDNGGTGDVTVAPSNFANGIAEWISSNSRSQAYKVTCSVRQSSAQNRKYTIKVEVPKGAWRSYLNMELTIPIFATNSDCELIVKAMQGLLKDGNPIPSAIAANSGIY

SEQ ID NO: 15 - DNA, 66 bp, Escherichia virus Lambda
  Lambda N22 (22 amino acid RNA-binding domain of lambda phage antiterminator protein N)
  CDS (1)..(66)
atggacgcacaaacacgacgacgtgagcgtcgcgctgagaaacaagctcaatggaaagctgcaaac

SEQ ID NO: 16 - protein, 22 aa, Escherichia virus Lambda
  Lambda N22 (22 amino acid RNA-binding domain of lambda phage antiterminator protein N)
MDAQTRRRERRAEKQAQWKAAN

SEQ ID NO: 17 - DNA, 19 bp, Unknown
  Description of Unknown: Enterobacteria phage MS2 sequence
  Enterobacteria phage_MS2 RNA stem-loop
acatgaggatcacccatgt

SEQ ID NO: 18 - DNA, 15 bp, Escherichia virus Lambda
  BoxB (lambda phase RNA stem-loop, specific binding site of Lambda N22)
gccctgaaaaagggc

SEQ ID NO: 19 - DNA, 1200 bp, Homo sapiens
  KIF16B 1-400 (Homo sapiens kinesin family member 16B fragment covering amino acid residues 1-400; Uniprot: Q96L93)
  CDS (1)..(1200)
atggcatcggtcaaggtggccgtgagggtccggcccatgaatcgcagggaaaaggacttggaggccaagttcattattcagatggagaaaagcaaaacgacaatcacaaacttaaagataccagaaggaggcactggggactcaggaagagaacggaccaagaccttcacctatgacttttctttttattctgctgatacaaaaagcccagattacgtttcacaagaaatggttttcaaaaccctcggcacagatgtcgtgaagtctgcatttgaaggttataatgcttgtgtctttgcatatgggcaaactggatctggaaagtcatacactatgatgggaaattctggagattctggcttaatacctcggatctgtgaaggactcttcagtcggataaatgaaaccaccagatgggatgaagcttcttttcgaactgaagtcagctacttagaaatttataacgaacgtgtgagagatctacttcggcggaagtcatctaaaaccttcaatttgagagtccgtgagcatcccaaagaaggcccttatgttgaggatttatccaaacatttagtacagaattatggtgacgtagaagaacttatggatgcgggcaatatcaaccggaccaccgcagcgactgggatgaacgacgtcagtagcaggtctcatgccatcttcaccatcaagttcactcaggctaaatttgattctgaaatgccatgtgaaaccgtcagtaagatccacttggttgatcttgccggaagtgagcgtgcagatgccaccggagccaccggggttaggctaaaggaagggggaaatattaacaagtccctcgtgactctggggaacgtcatttctgccttagctgatttatctcaggatgctgcaaatactcttgcaaagaagaagcaagttttcgtgccttacagggattctgtgttgacttggttgttaaaagatagccttggaggaaactctaaaactatcatgattgccaccatttcacctgctgatgtcaattatggagaaaccctaagtactcttcgctatgcaaatagagccaaaaacatcatcaacaagcctaccattaatgaggatgccaacgtcaaacttatccgtgagctgcgagctgaaatagccagactgaaaacgctgcttgctcaagggaatcagattgccctcttagactcccccaca

SEQ ID NO: 20 - protein, 400 aa, Homo sapiens
  KIF16B 1-400 (Homo sapiens kinesin family member 16B fragment covering amino acid residues 1-400; Uniprot: Q96L93)
MASVKVAVRVRPMNRREKDLEAKFIIQMEKSKTTITNLKIPEGGTGDSGRERTKTFTYDFSFYSADTKSPDYVSQEMVFKTLGTDVVKSAFEGYNACVFAYGQTGSGKSYTMMGNSGDSGLIPRICEGLFSRINETTRWDEASFRTEVSYLEIYNERVRDLLRRKSSKTFNLRVREHPKEGPYVEDLSKHLVQNYGDVEELMDAGNINRTTAATGMNDVSSRSHAIFTIKFTQAKFDSEMPCETVSKIHLVDLAGSERADATGATGVRLKEGGNINKSLVTLGNVISALADLSQDAANTLAKKKQVFVPYRDSVLTWLLKDSLGGNSKTIMIATISPADVNYGETLSTLRYANRAKNIINKPTINEDANVKLIRELRAEIARLKTLLAQGNQIALLDSPT

SEQ ID NO: 21 - DNA, 1230 bp, Homo sapiens
  KIF13A 1-411, DeltaP390 (Homo sapiens kinesin family member 13A fragment covering amino acid residues 1-411 wherein P390 is deleted; Uniprot: Q9H1H9)
  CDS (1)..(1230)
atgtcggataccaaggtaaaagttgccgtccgggtccggcccatgaaccgacgagaactggaactgaacaccaagtgcgtggtggagatggaagggaatcaaacggtcctgcaccctcctccttctaacaccaaacagggagaaaggaaacctcccaaggtatttgcctttgattattgcttttggtccatggatgaatctaacactacaaaatacgctggtcaagaagtggttttcaagtgccttggggaaggaattcttgaaaaagcctttcaggggtataatgcgtgtatttttgcatatggacagacaggttcgggaaaatccttttccatgatgggccatgctgagcagctgggccttattccaaggctctgctgtgctttatttaaaaggatctctttggagcaaaatgagtcacagacctttaaagttgaagtgtcctatatggaaatttataatgagaaagttcgggatcttttagaccccaaagggagtagacagtctcttaaagttcgagaacataaagttttgggaccatatgtagatggtttatctcaactagctgtcactagttttgaggatattgagtcattgatgtctgagggaaataagtctcgaacggtagctgctaccaacatgaacgaagaaagcagccgctcccatgctgtgttcaacatcataatcacacagacactttatgacctgcagtctgggaattccggggagaaagtcagtaaggtcagcttggtagacctggcgggtagcgaaagagtatctaaaacaggagctgcaggagagcgactgaaagaaggcagcaacattaacaaatcgcttacaaccttggggttggttatatcatcactggctgaccaggcagctggcaagggtaaaagcaaatttgtgccttatcgagattcagtcctcacttggctgcttaaggacaacttggggggcaacagccaaacctctatgatagccacaatcagcccagccgcagacaactatgaagagaccctctccacattaagatatgcagaccgagccaaaaggattgtgaaccatgctgttgtgaatgaggaccccaacgcaaaagtgatccgagaactgcgggaggaagtcgagaaactgagagagcagctctctcaggcagaggccatgaaggccgaactgaaggagaagctcgaagagtctgaaaagctgataaaagaactaacagtgacttgggaa

SEQ ID NO: 22 - protein, 410 aa, Homo sapiens
  KIF13A 1-411, DeltaP390 (Homo sapiens kinesin family member 13A fragment covering amino acid residues 1-411 wherein P390 is deleted; Uniprot: Q9H1H9)
MSDTKVKVAVRVRPMNRRELELNTKCVVEMEGNQTVLHPPPSNTKQGERKPPKVFAFDYCFWSMDESNTTKYAGQEVVFKCLGEGILEKAFQGYNACIFAYGQTGSGKSFSMMGHAEQLGLIPRLCCALFKRISLEQNESQTFKVEVSYMEIYNEKVRDLLDPKGSRQSLKVREHKVLGPYVDGLSQLAVTSFEDIESLMSEGNKSRTVAATNMNEESSRSHAVFNIIITQTLYDLQSGNSGEKVSKVSLVDLAGSERVSKTGAAGERLKEGSNINKSLTTLGLVISSLADQAAGKGKSKFVPYRDSVLTWLLKDNLGGNSQTSMIATISPAADNYEETLSTLRYADRAKRIVNHAVVNEDPNAKVIRELREEVEKLREQLSQAEAMKAELKEKLEESEKLIKELTVTWE

SEQ ID NO: 23 - DNA, 210 bp, Homo sapiens
  TOMM20 1-70 (Homo sapiens translocase of outer mitochondrial membrane 20 fragment covering amino acid residues 1-70; Uniprot: Q15388)
  CDS (1)..(210)
atggtgggtcggaacagcgccatcgccgccggtgtatgcggggcccttttcattgggtactgcatctacttcgaccgcaaaagacgaagtgaccccaacttcaagaacaggcttcgagaacgaagaaagaaacagaagcttgccaaggagagagctgggctttccaagttacctgaccttaaagatgctgaagctgttcagaaattcttc

SEQ ID NO: 24 - protein, 70 aa, Homo sapiens
  TOMM20 1-70 (Homo sapiens translocase of outer mitochondrial membrane 20 fragment covering amino acid residues 1-70; Uniprot: Q15388)
MVGRNSAIAAGVCGALFIGYCIYFDRKRRSDPNFKNRLRERRKKQKLAKERAGLSKLPDLKDAEAVQKFF

SEQ ID NO: 25 - DNA, 39 bp, Mus musculus
  LcK (posttranslational modification site for plasma membrane targeting of Mus musculus lymphocyte-specific protein tyrosine kinase; Uniprot: P06240)
  CDS (1)..(39)
ggctgcgtgtgcagcagcaaccccgagggtaccgagctc

SEQ ID NO: 26 - protein, 13 aa, Mus musculus
  LcK (posttranslational modification site for plasma membrane targeting of Mus musculus lymphocyte-specific protein tyrosine kinase; Uniprot: P06240)
GCVCSSNPEGTEL

SEQ ID NO: 27 - DNA, 441 bp, Mus musculus
  FRB-CD28 (synthetic membrane targeting fusion polypeptide derived from Mus musculus CD4 (Uniprot: P06332), FRB (similar to Homo sapiens mTOR; Uniprot: P42345) and Mus musculus CD28 (Uniprot: P31041)
  CDS (1)..(441)
atgtgccgagccatctctcttaggcgcttgctgctgctgctgctgcagctgtcacaactcctagctgtcactcaagggatgctcgagatgtggcatgaaggcctggaagaggcatctcgtttgtactttggggaaaggaacgtgaaaggcatgtttgaggtgctggagcccttgcatgctatgatggaacggggcccccagactctgaaggaaacatcctttaatcaggcctatggtcgagatttaatggaggcccaagagtggtgcaggaagtacatgaaatcagggaatgtcaaggacctcctccaagcctgggacctctattatcatgtgttccgacgaatctcaaagactagaaccggtaagcttttttgggcactggtcgtggttgctggagtcctgttttgttatggcttgctagtgacagtggctctttgtgtt

SEQ ID NO: 28 - protein, 147 aa, Mus musculus
  FRB-CD28 (synthetic membrane targeting fusion polypeptide derived from Mus musculus CD4 (Uniprot: P06332), FRB (similar to Homo sapiens mTOR; Uniprot: P42345) and Mus musculus CD28 (Uniprot: P31041)
MCRAISLRRLLLLLLQLSQLLAVTQGMLEMWHEGLEEASRLYFGERNVKGMFEVLEPLHAMMERGPQTLKETSFNQAYGRDLMEAQEWCRKYMKSGNVKDLLQAWDLYYHVFRRISKTRTGKLFWALVVVAGVLFCYGLLVTVALCV

SEQ ID NO: 29 - DNA, 1605 bp, Mus musculus
  FUS-CD28 (synthetic membrane targeting fusion polypeptide derived from Mus musculus CD4 (Uniprot: P06332), Homo sapiens fused-in sarcoma (Uniprot: P35637) and Mus musculus CD28 (Uniprot: P31041)
  CDS (1)..(1605)
atgtgccgagccatctctcttaggcgcttgctgctgctgctgctgcagctgtcacaactcctagctgtcactcaagggatgctcatggcctcaaacgattatacccaacaagcaacccaaagctatggggcctaccccacccagcccgggcagggctattcccagcagagcagtcagccctacggacagcagagttacagtggttatagccagtccacggacacttcaggatatggccagagcagctattcttcttatggccagagccagaacacaggctatggaactcagtcaactccccagggatatggctcgactggcggctatggcagtagccagagctcccaatcgtcttacgggcagcagtcctcctaccctggctatggccagcagccagctcccagcagcacctcgggaagttacggtagcagttctcagagcagcagctatgggcagccccagagtgggagctacagccagcagcctagctatggtggacagcagcaaagctatggacagcagcaaagctataatccccctcagggctatggacagcagaaccagtacaacagcagcagtggtggtggaggtggaggtggaggtggaggtaactatggccaagatcaatcctccatgagtagtggtggtggcagtggtggcggttatggcaatcaagaccagagtggtggaggtggcagcggtggctatggacagcaggaccgtggaggccgcggcaggggtggcagtggtggcggcggcggcggcggcggtggtggttacaaccgcagcagtggtggctatgaacccagaggtcgtggaggtggccgtggaggcagaggtggcatgggcggaagtgaccgtggtggcttcaataaatttggtggccctcgggaccaaggatcacgtcatgactccgaacaggataattcagacaacaacaccatctttgtgcaaggcctgggtgagaatgttacaattgagtctgtggctgattacttcaagcagattggtattattaagacaaacaagaaaacgggacagcccatgattaatttgtacacagacagggaaactggcaagctgaagggagaggcaacggtctcttttgatgacccaccttcagctaaagcagctattgactggtttgatggtaaagaattctccggaaatcctatcaaggtctcatttgctactcgccgggcagactttaatcggggtggtggcaatggtcgtggaggccgagggcgaggaggacccatgggccgtggaggctatggaggtggtggcagtggtggtggtggccgaggaggatttcccagtggaggtggtggcggtggaggacagcagcgagctggtgactggaagtgtcctaatcccacctgtgagaatatgaacttctcttggaggaatgaatgcaaccagtgtaaggcccctaaaccagatggcccaggagggggaccaggtggctctcacatggggggtaactacggggatgatcgtcgtggtggcagaggaggcggcaccggtaagcttttttgggcactggtcgtggttgctggagtcctgttttgttatggcttgctagtgacagtggctctttgtgtt

SEQ ID NO: 30 - protein, 535 aa, Mus musculus
  FUS-CD28 (synthetic membrane targeting fusion polypeptide derived from Mus musculus CD4 (Uniprot: P06332), Homo sapiens fused-in sarcoma (Uniprot: P35637) and Mus musculus CD28 (Uniprot: P31041)
MCRAISLRRLLLLLLQLSQLLAVTQGMLMASNDYTQQATQSYGAYPTQPGQGYSQQSSQPYGQQSYSGYSQSTDTSGYGQSSYSSYGQSQNTGYGTQSTPQGYGSTGGYGSSQSSQSSYGQQSSYPGYGQQPAPSSTSGSYGSSSQSSSYGQPQSGSYSQQPSYGGQQQSYGQQQSYNPPQGYGQQNQYNSSSGGGGGGGGGGNYGQDQSSMSSGGGSGGGYGNQDQSGGGGSGGYGQQDRGGRGRGGSGGGGGGGGGGYNRSSGGYEPRGRGGGRGGRGGMGGSDRGGFNKFGGPRDQGSRHDSEQDNSDNNTIFVQGLGENVTIESVADYFKQIGIIKTNKKTGQPMINLYTDRETGKLKGEATVSFDDPPSAKAAIDWFDGKEFSGNPIKVSFATRRADFNRGGGNGRGGRGRGGPMGRGGYGGGGSGGGGRGGFPSGGGGGGGQQRAGDWKCPNPTCENMNFSWRNECNQCKAPKPDGPGGGPGGSHMGGNYGDDRRGGRGGGTGKLFWALVVVAGVLFCYGLLVTVALCV

SEQ ID NO: 31 - DNA, 3594 bp, Caenorhabditis elegans
  SPD5 (Caenorhabditis elegans spindle-defective protein 5; Uniprot: P91349)
  CDS (1)..(3594)
atggaggacaacagcgtgctgaacgaggacagcaacctggagcacgtggagggccagcccagaagaagcatgagccagcccgtgctgaacgtggagggcgacaagagaaccagcagcaccagcgccacccagcagcaggtgctgagcggcgccttcagcagcgccgacgtgagaagcatccccatcatccagacctgggaggagaacaaggccctgaagaccaagatcaccatcctgagaggcgagctgcagatgtaccagagaagatacagcgaggccaaggaggccagccagaagagagtgaaggaggtgatggacgactacgtggacctgaagctgggccaggagaacgtgcaggagaagatggagcagtacaagctgatggaggaggacctgctggccatgcagagcagaatcgagaccagcgaggacaacttcgccagacagatgaaggagttcgaggcccagaagcacgccatggaggagagaatcaaggagctggagctgagcgccaccgacgccaacaacaccaccgtgggcagcttcagaggcaccctggacgacatcctgaagaagaacgaccccgacttcaccctgaccagcggctacgaggagagaaagatcaacgacctggaggccaagctgctgagcgagatcgacaaggtggccgagctggaggaccacatccagcagctgagacaggagctggacgaccagagcgccagactggccgacagcgagaacgtgagagcccagctggaggccgccaccggccagggcatcctgggcgccgccggcaacgccatggtgcccaacagcaccttcatgatcggcaacggcagagagagccagaccagagaccagctgaactacatcgacgacctggagaccaagctggccgacgccaagaaggagaacgacaaggccagacaggccctggtggagtacatgaacaagtgcagcaagctggagcacgagatcagaaccatggtgaagaacagcaccttcgacagcagcagcatgctgctgggcggccagaccagcgacgagctgaagatccagatcggcaaggtgaacggcgagctgaacgtgctgagagccgagaacagagagctgagaatcagatgcgaccagctgaccggcggcgacggcaacctgagcatcagcctgggccagagcagactgatggccggcatcgccaccaacgacgtggacagcatcggccagggcaacgagaccggcggcaccagcatgagaatcctgcccagagagagccagctggacgacctggaggagagcaagctgcccctgatggacaccagcagcgccgtgagaaaccagcagcagttcgccagcatgtgggaggacttcgagagcgtgaaggacagcctgcagaacaaccacaacgacaccctggagggcagcttcaacagcagcatgcccccccccggcagagacgccacccagagcttcctgagccagaagagcttcaagaacagccccatcgtgatgcagaagcccaagagcctgcacctgcacctgaagagccaccagagcgagggcgccggcgagcagatccagaacaacagcttcagcaccaagaccgccagcccccacgtgagccagagccacatccccatcctgcacgacatgcagcagatcctggacagcagcgccatgttcctggagggccagcacgacgtggccgtgaacgtggagcagatgcaggagaagatgagccagatcagagaggccctggccagactgttcgagagactgaagagcagcgccgccctgttcgaggagatcctggagagaatgggcagcagcgaccccaacgccgacaagatcaagaagatgaagctggccttcgagaccagcatcaacgacaagctgaacgtgagcgccatcctggaggccgccgagaaggacctgcacaacatgagcctgaacttcagcatcctggagaagagcatcgtgagccaggccgccgaggccagcagaagattcaccatcgcccccgacgccgaggacgtggccagcagcagcctgctgaacgccagctacagccccctgttcaagttcaccagcaacagcgacatcgtggagaagctgcagaacgaggtgagcgagctgaagaacgagctggagatggccagaaccagagacatgagaagccccctgaacggcagcagcggcagactgagcgacgtgcagatcaacaccaacagaatgttcgaggacctggaggtgagcgaggccaccctgcagaaggccaaggaggagaacagcaccctgaagagccagttcgccgagctggaggccaacctgcaccaggtgaacagcaagctgggcgaggtgagatgcgagctgaacgaggccctggccagagtggacggcgagcaggagaccagagtgaaggccgagaacgccctggaggaggccagacagctgatcagcagcctgaagcacgaggagaacgagctgaagaagaccatcaccgacatgggcatgagactgaacgaggccaagaagagcgacgagttcctgaagagcgagctgagcaccgccctggaggaggagaagaagagccagaacctggccgacgagctgagcgaggagctgaacggctggagaatgagaaccaaggaggccgagaacaaggtggagcacgccagcagcgagaagagcgagatgctggagagaatcgtgcacctggagaccgagatggagaagctgagcaccagcgagatcgccgccgactactgcagcaccaagatgaccgagagaaagaaggagatcgagctggccaagtacagagaggacttcgagaacgccgccatcgtgggcctggagagaatcagcaaggagatcagcgagctgaccaagaagaccctgaaggccaagatcatccccagcaacatcagcagcatccagctggtgtgcgacgagctgtgcagaagactgagcagagagagagagcagcagcacgagtacgccaaggtgatgagagacgtgaacgagaagatcgagaagctgcagctggagaaggacgccctggagcacgagctgaagatgatgagcagcaacaacgagaacgtgccccccgtgggcaccagcgtgagcggcatgcccaccaagaccagcaaccagaagtgcgcccagccccactacaccagccccaccagacagctgctgcacgagagcaccatggccgtggacgccatcgtgcagaagctgaagaagacccacaacatgagcggcatgggccccgagctgaaggagaccatcggcaacgtgatcaacgagagcagagtgctgagagacttcctgcaccagaagctgatcctgttcaagggcatcgacatgagcaactggaagaacgagaccgtggaccagctgatcaccgacctgggccagctgcaccaggacaacctgatgctggaggagcagatcaagaagtacaagaaggagctgaagctgaccaagagcgccatccccaccctgggcgtggagttccaggacagaatcaagaccgagatcggcaagatcgccaccgacatgggcggcgccgtgaaggagatcagaaagaag

SEQ ID NO: 32 - protein, 1198 aa, Caenorhabditis elegans
  SPD5 (Caenorhabditis elegans spindle-defective protein 5; Uniprot: P91349)
MEDNSVLNEDSNLEHVEGQPRRSMSQPVLNVEGDKRTSSTSATQQQVLSGAFSSADVRSIPIIQTWEENKALKTKITILRGELQMYQRRYSEAKEASQKRVKEVMDDYVDLKLGQENVQEKMEQYKLMEEDLLAMQSRIETSEDNFARQMKEFEAQKHAMEERIKELELSATDANNTTVGSFRGTLDDILKKNDPDFTLTSGYEERKINDLEAKLLSEIDKVAELEDHIQQLRQELDDQSARLADSENVRAQLEAATGQGILGAAGNAMVPNSTFMIGNGRESQTRDQLNYIDDLETKLADAKKENDKARQALVEYMNKCSKLEHEIRTMVKNSTFDSSSMLLGGQTSDELKIQIGKVNGELNVLRAENRELRIRCDQLTGGDGNLSISLGQSRLMAGIATNDVDSIGQGNETGGTSMRILPRESQLDDLEESKLPLMDTSSAVRNQQQFASMWEDFESVKDSLQNNHNDTLEGSFNSSMPPPGRDATQSFLSQKSFKNSPIVMQKPKSLHLHLKSHQSEGAGEQIQNNSFSTKTASPHVSQSHIPILHDMQQILDSSAMFLEGQHDVAVNVEQMQEKMSQIREALARLFERLKSSAALFEEILERMGSSDPNADKIKKMKLAFETSINDKLNVSAILEAAEKDLHNMSLNFSILEKSIVSQAAEASRRFTIAPDAEDVASSSLLNASYSPLFKFTSNSDIVEKLQNEVSELKNELEMARTRDMRSPLNGSSGRLSDVQINTNRMFEDLEVSEATLQKAKEENSTLKSQFAELEANLHQVNSKLGEVRCELNEALARVDGEQETRVKAENALEEARQLISSLKHEENELKKTITDMGMRLNEAKKSDEFLKSELSTALEEEKKSQNLADELSEELNGWRMRTKEAENKVEHASSEKSEMLERIVHLETEMEKLSTSEIAADYCSTKMTERKKEIELAKYREDFENAAIVGLERISKEISELTKKTLKAKIIPSNISSIQLVCDELCRRLSREREQQHEYAKVMRDVNEKIEKLQLEKDALEHELKMMSSNNENVPPVGTSVSGMPTKTSNQKCAQPHYTSPTRQLLHESTMAVDAIVQKLKKTHNMSGMGPELKETIGNVINESRVLRDFLHQKLILFKGIDMSNWKNETVDQLITDLGQLHQDNLMLEEQIKKYKKELKLTKSAIPTLGVEFQDRIKTEIGKIATDMGGAVKEIRKK

SEQ ID NO: 33 - DNA, 1434 bp, Homo sapiens
  FUS (Homo sapiens fused-in sarcoma; Uniprot: P35637)
  CDS (1)..(1434)
atggcctcaaacgattatacccaacaagcaacccaaagctatggggcctaccccacccagcccgggcagggctattcccagcagagcagtcagccctacggacagcagagttacagtggttatagccagtccacggacacttcaggatatggccagagcagctattcttcttatggccagagccagaacacaggctatggaactcagtcaactccccagggatatggctcgactggcggctatggcagtagccagagctcccaatcgtcttacgggcagcagtcctcctaccctggctatggccagcagccagctcccagcagcacctcgggaagttacggtagcagttctcagagcagcagctatgggcagccccagagtgggagctacagccagcagcctagctatggtggacagcagcaaagctatggacagcagcaaagctataatccccctcagggctatggacagcagaaccagtacaacagcagcagtggtggtggaggtggaggtggaggtggaggtaactatggccaagatcaatcctccatgagtagtggtggtggcagtggtggcggttatggcaatcaagaccagagtggtggaggtggcagcggtggctatggacagcaggaccgtggaggccgcggcaggggtggcagtggtggcggcggcggcggcggcggtggtggttacaaccgcagcagtggtggctatgaacccagaggtcgtggaggtggccgtggaggcagaggtggcatgggcggaagtgaccgtggtggcttcaataaatttggtggccctcgggaccaaggatcacgtcatgactccgaacaggataattcagacaacaacaccatctttgtgcaaggcctgggtgagaatgttacaattgagtctgtggctgattacttcaagcagattggtattattaagacaaacaagaaaacgggacagcccatgattaatttgtacacagacagggaaactggcaagctgaagggagaggcaacggtctcttttgatgacccaccttcagctaaagcagctattgactggtttgatggtaaagaattctccggaaatcctatcaaggtctcatttgctactcgccgggcagactttaatcggggtggtggcaatggtcgtggaggccgagggcgaggaggacccatgggccgtggaggctatggaggtggtggcagtggtggtggtggccgaggaggatttcccagtggaggtggtggcggtggaggacagcagcgagctggtgactggaagtgtcctaatcccacctgtgagaatatgaacttctcttggaggaatgaatgcaaccagtgtaaggcccctaaaccagatggcccaggagggggaccaggtggctctcacatggggggtaactacggggatgatcgtcgtggtggcagaggaggc

SEQ ID NO: 34 - protein, 478 aa, Homo sapiens
  FUS (Homo sapiens fused-in sarcoma; Uniprot: P35637)
MASNDYTQQATQSYGAYPTQPGQGYSQQSSQPYGQQSYSGYSQSTDTSGYGQSSYSSYGQSQNTGYGTQSTPQGYGSTGGYGSSQSSQSSYGQQSSYPGYGQQPAPSSTSGSYGSSSQSSSYGQPQSGSYSQQPSYGGQQQSYGQQQSYNPPQGYGQQNQYNSSSGGGGGGGGGGNYGQDQSSMSSGGGSGGGYGNQDQSGGGGSGGYGQQDRGGRGRGGSGGGGGGGGGGYNRSSGGYEPRGRGGGRGGRGGMGGSDRGGFNKFGGPRDQGSRHDSEQDNSDNNTIFVQGLGENVTIESVADYFKQIGIIKTNKKTGQPMINLYTDRETGKLKGEATVSFDDPPSAKAAIDWFDGKEFSGNPIKVSFATRRADFNRGGGNGRGGRGRGGPMGRGGYGGGGSGGGGRGGFPSGGGGGGGQQRAGDWKCPNPTCENMNFSWRNECNQCKAPKPDGPGGGPGGSHMGGNYGDDRRGGRGG

SEQ ID NO: 35 - DNA, 1884 bp, Homo sapiens
  EWSR1 (Homo sapiens Ewing sarcoma breakpoint region 1; Uniprot: Q01844)
  CDS (1)..(1884)
atggcgtccacggattacagtacctatagccaagctgcagcgcagcagggctacagtgcttacaccgcccagcccactcaaggatatgcacagaccacccaggcatatgggcaacaaagctatggaacctatggacagcccactgatgtcagctatacccaggctcagaccactgcaacctatgggcagaccgcctatgcaacttcttatggacagcctcccactggttatactactccaactgccccccaggcatacagccagcctgtccaggggtatggcactggtgcttatgataccaccactgctacagtcaccaccacccaggcctcctatgcagctcagtctgcatatggcactcagcctgcttatccagcctatgggcagcagccagcagccactgcacctacaagaccgcaggatggaaacaagcccactgagactagtcaacctcaatctagcacagggggttacaaccagcccagcctaggatatggacagagtaactacagttatccccaggtacctgggagctaccccatgcagccagtcactgcacctccatcctaccctcctaccagctattcctctacacagccgactagttatgatcagagcagttactctcagcagaacacctatgggcaaccgagcagctatggacagcagagtagctatggtcaacaaagcagctatgggcagcagcctcccactagttacccaccccaaactggatcctacagccaagctccaagtcaatatagccaacagagcagcagctacgggcagcagagttcattccgacaggaccaccccagtagcatgggtgtttatgggcaggagtctggaggattttccggaccaggagagaaccggagcatgagtggccctgataaccggggcaggggaagagggggatttgatcgtggaggcatgagcagaggtgggcggggaggaggacgcggtggaatgggcagcgctggagagcgaggtggcttcaataagcctggtggacccatggatgaaggaccagatcttgatctaggcccacctgtagatccagatgaagactctgacaacagtgcaatttatgtacaaggattaaatgacagtgtgactctagatgatctggcagacttctttaagcagtgtggggttgttaagatgaacaagagaactgggcaacccatgatccacatctacctggacaaggaaacaggaaagcccaaaggcgatgccacagtgtcctatgaagacccacccactgccaaggctgccgtggaatggtttgatgggaaagattttcaagggagcaaacttaaagtctcccttgctcggaagaagcctccaatgaacagtatgcggggtggtctgccaccccgtgagggcagaggcatgccaccaccactccgtggaggtccaggaggcccaggaggtcctgggggacccatgggtcgcatgggaggccgtggaggagatagaggaggcttccctccaagaggaccccggggttcccgagggaacccctctggaggaggaaacgtccagcaccgagctggagactggcagtgtcccaatccgggttgtggaaaccagaacttcgcctggagaacagagtgcaaccagtgtaaggccccaaagcctgaaggcttcctcccgccaccctttccgcccccgggtggtgatcgtggcagaggtggccctggtggcatgcggggaggaagaggtggcctcatggatcgtggtggtcccggtggaatgttcagaggtggccgtggtggagacagaggtggcttccgtggtggccggggcatggaccgaggtggctttggtggaggaagacgaggtggccctggggggccccctggacctttgatggaacag

SEQ ID NO: 36 - protein, 628 aa, Homo sapiens
  EWSR1 (Homo sapiens Ewing sarcoma breakpoint region 1; Uniprot: Q01844)
MASTDYSTYSQAAAQQGYSAYTAQPTQGYAQTTQAYGQQSYGTYGQPTDVSYTQAQTTATYGQTAYATSYGQPPTGYTTPTAPQAYSQPVQGYGTGAYDTTTATVTTTQASYAAQSAYGTQPAYPAYGQQPAATAPTRPQDGNKPTETSQPQSSTGGYNQPSLGYGQSNYSYPQVPGSYPMQPVTAPPSYPPTSYSSTQPTSYDQSSYSQQNTYGQPSSYGQQSSYGQQSSYGQQPPTSYPPQTGSYSQAPSQYSQQSSSYGQQSSFRQDHPSSMGVYGQESGGFSGPGENRSMSGPDNRGRGRGGFDRGGMSRGGRGGGRGGMGSAGERGGFNKPGGPMDEGPDLDLGPPVDPDEDSDNSAIYVQGLNDSVTLDDLADFFKQCGVVKMNKRTGQPMIHIYLDKETGKPKGDATVSYEDPPTAKAAVEWFDGKDFQGSKLKVSLARKKPPMNSMRGGLPPREGRGMPPPLRGGPGGPGGPGGPMGRMGGRGGDRGGFPPRGPRGSRGNPSGGGNVQHRAGDWQCPNPGCGNQNFAWRTECNQCKAPKPEGFLPPPFPPPGGDRGRGGPGGMRGGRGGLMDRGGPGGMFRGGRGGDRGGFRGGRGMDRGGFGGGRRGGPGGPPGPLMEQ

SEQ ID NO: 37 - DNA, 2334 bp, Artificial Sequence
  Description of Artificial Sequence: Synthetic polynucleotide
  EWSR1-MCP
  CDS (1)..(2334)
atggcgtccacggattacagtacctatagccaagctgcagcgcagcagggctacagtgcttacaccgcccagcccactcaaggatatgcacagaccacccaggcatatgggcaacaaagctatggaacctatggacagcccactgatgtcagctatacccaggctcagaccactgcaacctatgggcagaccgcctatgcaacttcttatggacagcctcccactggttatactactccaactgccccccaggcatacagccagcctgtccaggggtatggcactggtgcttatgataccaccactgctacagtcaccaccacccaggcctcctatgcagctcagtctgcatatggcactcagcctgcttatccagcctatgggcagcagccagcagccactgcacctacaagaccgcaggatggaaacaagcccactgagactagtcaacctcaatctagcacagggggttacaaccagcccagcctaggatatggacagagtaactacagttatccccaggtacctgggagctaccccatgcagccagtcactgcacctccatcctaccctcctaccagctattcctctacacagccgactagttatgatcagagcagttactctcagcagaacacctatgggcaaccgagcagctatggacagcagagtagctatggtcaacaaagcagctatgggcagcagcctcccactagttacccaccccaaactggatcctacagccaagctccaagtcaatatagccaacagagcagcagctacgggcagcagagttcattccgacaggaccaccccagtagcatgggtgtttatgggcaggagtctggaggattttccggaccaggagagaaccggagcatgagtggccctgataaccggggcaggggaagagggggatttgatcgtggaggcatgagcagaggtgggcggggaggaggacgcggtggaatgggcagcgctggagagcgaggtggcttcaataagcctggtggacccatggatgaaggaccagatcttgatctaggcccacctgtagatccagatgaagactctgacaacagtgcaatttatgtacaaggattaaatgacagtgtgactctagatgatctggcagacttctttaagcagtgtggggttgttaagatgaacaagagaactgggcaacccatgatccacatctacctggacaaggaaacaggaaagcccaaaggcgatgccacagtgtcctatgaagacccacccactgccaaggctgccgtggaatggtttgatgggaaagattttcaagggagcaaacttaaagtctcccttgctcggaagaagcctccaatgaacagtatgcggggtggtctgccaccccgtgagggcagaggcatgccaccaccactccgtggaggtccaggaggcccaggaggtcctgggggacccatgggtcgcatgggaggccgtggaggagatagaggaggcttccctccaagaggaccccggggttcccgagggaacccctctggaggaggaaacgtccagcaccgagctggagactggcagtgtcccaatccgggttgtggaaaccagaacttcgcctggagaacagagtgcaaccagtgtaaggccccaaagcctgaaggcttcctcccgccaccctttccgcccccgggtggtgatcgtggcagaggtggccctggtggcatgcggggaggaagaggtggcctcatggatcgtggtggtcccggtggaatgttcagaggtggccgtggtggagacagaggtggcttccgtggtggccggggcatggaccgaggtggctttggtggaggaagacgaggtggccctggggggccccctggacctttgatggaacaggattacaaggatgacgacgataagggtaccgagcagaagctgatctcagaggaggacctgggcgcccccggctccgccggctccgccgccggctccggcgcttctaactttactcagttcgttctcgtcgacaatggcggaactggcgacgtgactgtcgccccaagcaacttcgctaacgggatcgctgaatggatcagctctaactcgcgttcacaggcttacaaagtaacctgtagcgttcgtcagagctctgcgcagaatcgcaaatacaccatcaaagtcgaggtgcctaaaggcgcctggcgttcgtacttaaatatggaactaaccattccaattttcgccacgaattccgactgcgagcttattgttaaggcaatgcaaggtctcctaaaagatggaaacccgattccctcagcaatcgcagcaaactccggcatctactaa

SEQ ID NO: 38 - protein, 777 aa, Artificial Sequence
  Description of Artificial Sequence: Synthetic polypeptide
  EWSR1-MCP
MASTDYSTYSQAAAQQGYSAYTAQPTQGYAQTTQAYGQQSYGTYGQPTDVSYTQAQTTATYGQTAYATSYGQPPTGYTTPTAPQAYSQPVQGYGTGAYDTTTATVTTTQASYAAQSAYGTQPAYPAYGQQPAATAPTRPQDGNKPTETSQPQSSTGGYNQPSLGYGQSNYSYPQVPGSYPMQPVTAPPSYPPTSYSSTQPTSYDQSSYSQQNTYGQPSSYGQQSSYGQQSSYGQQPPTSYPPQTGSYSQAPSQYSQQSSSYGQQSSFRQDHPSSMGVYGQESGGFSGPGENRSMSGPDNRGRGRGGFDRGGMSRGGRGGGRGGMGSAGERGGFNKPGGPMDEGPDLDLGPPVDPDEDSDNSAIYVQGLNDSVTLDDLADFFKQCGVVKMNKRTGQPMIHIYLDKETGKPKGDATVSYEDPPTAKAAVEWFDGKDFQGSKLKVSLARKKPPMNSMRGGLPPREGRGMPPPLRGGPGGPGGPGGPMGRMGGRGGDRGGFPPRGPRGSRGNPSGGGNVQHRAGDWQCPNPGCGNQNFAWRTECNQCKAPKPEGFLPPPFPPPGGDRGRGGPGGMRGGRGGLMDRGGPGGMFRGGRGGDRGGFRGGRGMDRGGFGGGRRGGPGGPPGPLMEQDYKDDDDKGTEQKLISEEDLGAPGSAGSAAGSGASNFTQFVLVDNGGTGDVTVAPSNFANGIAEWISSNSRSQAYKVTCSVRQSSAQNRKYTIKVEVPKGAWRSYLNMELTIPIFATNSDCELIVKAMQGLLKDGNPIPSAIAANSGIY

SEQ ID NO: 39 - DNA, 1884 bp, Artificial Sequence
  Description of Artificial Sequence: Synthetic polynucleotide
  FUS-MCP
  CDS (1)..(1884)
atggcctcaaacgattatacccaacaagcaacccaaagctatggggcctaccccacccagcccgggcagggctattcccagcagagcagtcagccctacggacagcagagttacagtggttatagccagtccacggacacttcaggatatggccagagcagctattcttcttatggccagagccagaacacaggctatggaactcagtcaactccccagggatatggctcgactggcggctatggcagtagccagagctcccaatcgtcttacgggcagcagtcctcctaccctggctatggccagcagccagctcccagcagcacctcgggaagttacggtagcagttctcagagcagcagctatgggcagccccagagtgggagctacagccagcagcctagctatggtggacagcagcaaagctatggacagcagcaaagctataatccccctcagggctatggacagcagaaccagtacaacagcagcagtggtggtggaggtggaggtggaggtggaggtaactatggccaagatcaatcctccatgagtagtggtggtggcagtggtggcggttatggcaatcaagaccagagtggtggaggtggcagcggtggctatggacagcaggaccgtggaggccgcggcaggggtggcagtggtggcggcggcggcggcggcggtggtggttacaaccgcagcagtggtggctatgaacccagaggtcgtggaggtggccgtggaggcagaggtggcatgggcggaagtgaccgtggtggcttcaataaatttggtggccctcgggaccaaggatcacgtcatgactccgaacaggataattcagacaacaacaccatctttgtgcaaggcctgggtgagaatgttacaattgagtctgtggctgattacttcaagcagattggtattattaagacaaacaagaaaacgggacagcccatgattaatttgtacacagacagggaaactggcaagctgaagggagaggcaacggtctcttttgatgacccaccttcagctaaagcagctattgactggtttgatggtaaagaattctccggaaatcctatcaaggtctcatttgctactcgccgggcagactttaatcggggtggtggcaatggtcgtggaggccgagggcgaggaggacccatgggccgtggaggctatggaggtggtggcagtggtggtggtggccgaggaggatttcccagtggaggtggtggcggtggaggacagcagcgagctggtgactggaagtgtcctaatcccacctgtgagaatatgaacttctcttggaggaatgaatgcaaccagtgtaaggcccctaaaccagatggcccaggagggggaccaggtggctctcacatggggggtaactacggggatgatcgtcgtggtggcagaggaggcgattacaaggatgacgacgataagggtaccgagcagaagctgatctcagaggaggacctgggcgcccccggctccgccggctccgccgccggctccggcgcttctaactttactcagttcgttctcgtcgacaatggcggaactggcgacgtgactgtcgccccaagcaacttcgctaacgggatcgctgaatggatcagctctaactcgcgttcacaggcttacaaagtaacctgtagcgttcgtcagagctctgcgcagaatcgcaaatacaccatcaaagtcgaggtgcctaaaggcgcctggcgttcgtacttaaatatggaactaaccattccaattttcgccacgaattccgactgcgagcttattgttaaggcaatgcaaggtctcctaaaagatggaaacccgattccctcagcaatcgcagcaaactccggcatctactaa

SEQ ID NO: 40 - protein, 627 aa, Artificial Sequence
  Description of Artificial Sequence: Synthetic polypeptide
  FUS-MCP
MASNDYTQQATQSYGAYPTQPGQGYSQQSSQPYGQQSYSGYSQSTDTSGYGQSSYSSYGQSQNTGYGTQSTPQGYGSTGGYGSSQSSQSSYGQQSSYPGYGQQPAPSSTSGSYGSSSQSSSYGQPQSGSYSQQPSYGGQQQSYGQQQSYNPPQGYGQQNQYNSSSGGGGGGGGGGNYGQDQSSMSSGGGSGGGYGNQDQSGGGGSGGYGQQDRGGRGRGGSGGGGGGGGGGYNRSSGGYEPRGRGGGRGGRGGMGGSDRGGFNKFGGPRDQGSRHDSEQDNSDNNTIFVQGLGENVTIESVADYFKQIGIIKTNKKTGQPMINLYTDRETGKLKGEATVSFDDPPSAKAAIDWFDGKEFSGNPIKVSFATRRADFNRGGGNGRGGRGRGGPMGRGGYGGGGSGGGGRGGFPSGGGGGGGQQRAGDWKCPNPTCENMNFSWRNECNQCKAPKPDGPGGGPGGSHMGGNYGDDRRGGRGGDYKDDDDKGTEQKLISEEDLGAPGSAGSAAGSGASNFTQFVLVDNGGTGDVTVAPSNFANGIAEWISSNSRSQAYKVTCSVRQSSAQNRKYTIKVEVPKGAWRSYLNMELTIPIFATNSDCELIVKAMQGLLKDGNPIPSAIAANSGIY

SEQ ID NO: 41 - DNA, 3309 bp, Artificial Sequence
  Description of Artificial Sequence: Synthetic polynucleotide
  FUS-PylRS AF
  CDS (1)..(3309)
atggcctcaaacgattatacccaacaagcaacccaaagctatggggcctaccccacccagcccgggcagggctattcccagcagagcagtcagccctacggacagcagagttacagtggttatagccagtccacggacacttcaggatatggccagagcagctattcttcttatggccagagccagaacacaggctatggaactcagtcaactccccagggatatggctcgactggcggctatggcagtagccagagctcccaatcgtcttacgggcagcagtcctcctaccctggctatggccagcagccagctcccagcagcacctcgggaagttacggtagcagttctcagagcagcagctatgggcagccccagagtgggagctacagccagcagcctagctatggtggacagcagcaaagctatggacagcagcaaagctataatccccctcagggctatggacagcagaaccagtacaacagcagcagtggtggtggaggtggaggtggaggtggaggtaactatggccaagatcaatcctccatgagtagtggtggtggcagtggtggcggttatggcaatcaagaccagagtggtggaggtggcagcggtggctatggacagcaggaccgtggaggccgcggcaggggtggcagtggtggcggcggcggcggcggcggtggtggttacaaccgcagcagtggtggctatgaacccagaggtcgtggaggtggccgtggaggcagaggtggcatgggcggaagtgaccgtggtggcttcaataaatttggtggccctcgggaccaaggatcacgtcatgactccgaacaggataattcagacaacaacaccatctttgtgcaaggcctgggtgagaatgttacaattgagtctgtggctgattacttcaagcagattggtattattaagacaaacaagaaaacgggacagcccatgattaatttgtacacagacagggaaactggcaagctgaagggagaggcaacggtctcttttgatgacccaccttcagctaaagcagctattgactggtttgatggtaaagaattctccggaaatcctatcaaggtctcatttgctactcgccgggcagactttaatcggggtggtggcaatggtcgtggaggccgagggcgaggaggacccatgggccgtggaggctatggaggtggtggcagtggtggtggtggccgaggaggatttcccagtggaggtggtggcggtggaggacagcagcgagctggtgactggaagtgtcctaatcccacctgtgagaatatgaacttctcttggaggaatgaatgcaaccagtgtaaggcccctaaaccagatggcccaggagggggaccaggtggctctcacatggggggtaactacggggatgatcgtcgtggtggcagaggaggcgattacaaggatgacgacgataagggtaccggcgcccccggctccgccggctccgccgccggctccggcgcttctaactttactcagttcgttctcgtcgacaatggcggaactggcgacgtgactgtcgccccaagcaacttcgctaacgggatcgctgaatggatcagctctaactcgcgttcacaggcttacaaagtaacctgtagcgttcgtcagagctctgcgcagaatcgcaaatacaccatcaaagtcgaggtgcctaaaggcgcctggcgttcgtacttaaatatggaactaaccattccaattttcgccacgaattccgactgcgagcttattgttaaggcaatgcaaggtctcctaaaagatggaaacccgattccctcagcaatcgcagcaaactccggcatctacggtaccggcgcccccggctccgccggctccgccgccggctccggcgcgtgcccggtgccgctgcagctgccgccgctggaacgcctgaccctggatgataaaaaaccgctgaataccctgatctctgctactggtctgtggatgagtcgtaccggaaccattcataaaatcaaacaccacgaggttagccgttcgaaaatctatattgagatggcgtgtggcgatcatctggttgtgaacaatagccgctcttctcgtacagcacgtgcactgcgtcaccacaaatatcgtaaaacctgtaaacgttgccgtgtgtccgatgaggatctgaacaaattcctgacaaaagccaatgaggaccaaacaagcgtgaaagtgaaagtcgttagcgctcctacccgtactaaaaaagcaatgccgaaatccgttgctcgtgcccctaaaccactggaaaacactgaagcagcacaggcacagccgtctggaagcaaattctctccggccattcctgtttctacccaggagtccgtttctgttccagcaagtgtgagcaccagcattagcagtattagcaccggtgccaccgctagcgccctggttaaaggcaataccaatccgattacaagcatgtctgccccggttcaagcatcagctccagcactgacaaaatcccaaaccgatcgtctggaggttctgctgaatccgaaagacgaaatcagcctgaattccggcaaaccgtttcgtgaactggagagcgaactgctgtcacgtcgtaaaaaagacctgcaacaaatctatgccgaagaacgtgagaactatctggggaaactggaacgtgaaatcacccgctttttcgtggatcgtggctttctggagatcaaatccccgattctgattcctctggagtatatcgagcgtatgggcatcgacaatgataccgaactgagcaaacaaattttccgtgtggataaaaacttctgtctgcgccctatgctagcaccaaatctggctaactatctgcgcaaactggaccgtgccctgcctgatcctatcaaaatcttcgagatcggcccgtgttatcgtaaagagtccgacggtaaagaacatctggaggagtttaccatgctgaacttttgccaaatgggttcaggttgtactcgtgagaacctggaaagcatcatcaccgattttctgaaccacctgggcattgacttcaaaattgtgggcgacagctgtatggtgtttggcgacaccctggatgtcatgcacggcgacctggaactgtctagtgccgttgtgggcccaatcccgctggatcgtgagtggggtatcgacaaaccttggatcggtgcgggttttggtctggagcgtctgctgaaagtaaaacacgacttcaagaacatcaaacgtgctgcacgttccgagtcctattacaatggtatttctactaacctgtaa

SEQ ID NO: 42 - protein, 1102 aa, Artificial Sequence
  Description of Artificial Sequence: Synthetic polypeptide
  FUS-PylRS AF
MASNDYTQQATQSYGAYPTQPGQGYSQQSSQPYGQQSYSGYSQSTDTSGYGQSSYSSYGQSQNTGYGTQSTPQGYGSTGGYGSSQSSQSSYGQQSSYPGYGQQPAPSSTSGSYGSSSQSSSYGQPQSGSYSQQPSYGGQQQSYGQQQSYNPPQGYGQQNQYNSSSGGGGGGGGGGNYGQDQSSMSSGGGSGGGYGNQDQSGGGGSGGYGQQDRGGRGRGGSGGGGGGGGGGYNRSSGGYEPRGRGGGRGGRGGMGGSDRGGFNKFGGPRDQGSRHDSEQDNSDNNTIFVQGLGENVTIESVADYFKQIGIIKTNKKTGQPMINLYTDRETGKLKGEATVSFDDPPSAKAAIDWFDGKEFSGNPIKVSFATRRADFNRGGGNGRGGRGRGGPMGRGGYGGGGSGGGGRGGFPSGGGGGGGQQRAGDWKCPNPTCENMNFSWRNECNQCKAPKPDGPGGGPGGSHMGGNYGDDRRGGRGGDYKDDDDKGTGAPGSAGSAAGSGASNFTQFVLVDNGGTGDVTVAPSNFANGIAEWISSNSRSQAYKVTCSVRQSSAQNRKYTIKVEVPKGAWRSYLNMELTIPIFATNSDCELIVKAMQGLLKDGNPIPSAIAANSGIYGTGAPGSAGSAAGSGACPVPLQLPPLERLTLDDKKPLNTLISATGLWMSRTGTIHKIKHHEVSRSKIYIEMACGDHLVVNNSRSSRTARALRHHKYRKTCKRCRVSDEDLNKFLTKANEDQTSVKVKVVSAPTRTKKAMPKSVARAPKPLENTEAAQAQPSGSKFSPAIPVSTQESVSVPASVSTSISSISTGATASALVKGNTNPITSMSAPVQASAPALTKSQTDRLEVLLNPKDEISLNSGKPFRELESELLSRRKKDLQQIYAEERENYLGKLEREITRFFVDRGFLEIKSPILIPLEYIERMGIDNDTELSKQIFRVDKNFCLRPMLAPNLANYLRKLDRALPDPIKIFEIGPCYRKESDGKEHLEEFTMLNFCQMGSGCTRENLESIITDFLNHLGIDFKIVGDSCMVFGDTLDVMHGDLELSSAVVGPIPLDREWGIDKPWIGAGFGLERLLKVKHDFKNIKRAARSESYYNGISTNL

SEQ ID NO: 43 - DNA, 1809 bp, Artificial Sequence
  Description of Artificial Sequence: Synthetic polynucleotide
  MCP-PylRS AF
  CDS (1)..(1809)
atggcttctaactttactcagttcgttctcgtcgacaatggcggaactggcgacgtgactgtcgccccaagcaacttcgctaacgggatcgctgaatggatcagctctaactcgcgttcacaggcttacaaagtaacctgtagcgttcgtcagagctctgcgcagaatcgcaaatacaccatcaaagtcgaggtgcctaaaggcgcctggcgttcgtacttaaatatggaactaaccattccaattttcgccacgaattccgactgcgagcttattgttaaggcaatgcaaggtctcctaaaagatggaaacccgattccctcagcaatcgcagcaaactccggcatctacggtaccggcgcccccggctccgccggctccgccgccggctccggcgcgtgcccggtgccgctgcagctgccgccgctggaacgcctgaccctggatgataaaaaaccgctgaataccctgatctctgctactggtctgtggatgagtcgtaccggaaccattcataaaatcaaacaccacgaggttagccgttcgaaaatctatattgagatggcgtgtggcgatcatctggttgtgaacaatagccgctcttctcgtacagcacgtgcactgcgtcaccacaaatatcgtaaaacctgtaaacgttgccgtgtgtccgatgaggatctgaacaaattcctgacaaaagccaatgaggaccaaacaagcgtgaaagtgaaagtcgttagcgctcctacccgtactaaaaaagcaatgccgaaatccgttgctcgtgcccctaaaccactggaaaacactgaagcagcacaggcacagccgtctggaagcaaattctctccggccattcctgtttctacccaggagtccgtttctgttccagcaagtgtgagcaccagcattagcagtattagcaccggtgccaccgctagcgccctggttaaaggcaataccaatccgattacaagcatgtctgccccggttcaagcatcagctccagcactgacaaaatcccaaaccgatcgtctggaggttctgctgaatccgaaagacgaaatcagcctgaattccggcaaaccgtttcgtgaactggagagcgaactgctgtcacgtcgtaaaaaagacctgcaacaaatctatgccgaagaacgtgagaactatctggggaaactggaacgtgaaatcacccgctttttcgtggatcgtggctttctggagatcaaatccccgattctgattcctctggagtatatcgagcgtatgggcatcgacaatgataccgaactgagcaaacaaattttccgtgtggataaaaacttctgtctgcgccctatgctagcaccaaatctggctaactatctgcgcaaactggaccgtgccctgcctgatcctatcaaaatcttcgagatcggcccgtgttatcgtaaagagtccgacggtaaagaacatctggaggagtttaccatgctgaacttttgccaaatgggttcaggttgtactcgtgagaacctggaaagcatcatcaccgattttctgaaccacctgggcattgacttcaaaattgtgggcgacagctgtatggtgtttggcgacaccctggatgtcatgcacggcgacctggaactgtctagtgccgttgtgggcccaatcccgctggatcgtgagtggggtatcgacaaaccttggatcggtgcgggttttggtctggagcgtctgctgaaagtaaaacacgacttcaagaacatcaaacgtgctgcacgttccgagtcctattacaatggtatttctactaacctgtaa

SEQ ID NO: 44 - protein, 602 aa, Artificial Sequence
  Description of Artificial Sequence: Synthetic polypeptide
  MCP-PylRS AF
MASNFTQFVLVDNGGTGDVTVAPSNFANGIAEWISSNSRSQAYKVTCSVRQSSAQNRKYTIKVEVPKGAWRSYLNMELTIPIFATNSDCELIVKAMQGLLKDGNPIPSAIAANSGIYGTGAPGSAGSAAGSGACPVPLQLPPLERLTLDDKKPLNTLISATGLWMSRTGTIHKIKHHEVSRSKIYIEMACGDHLVVNNSRSSRTARALRHHKYRKTCKRCRVSDEDLNKFLTKANEDQTSVKVKVVSAPTRTKKAMPKSVARAPKPLENTEAAQAQPSGSKFSPAIPVSTQESVSVPASVSTSISSISTGATASALVKGNTNPITSMSAPVQASAPALTKSQTDRLEVLLNPKDEISLNSGKPFRELESELLSRRKKDLQQIYAEERENYLGKLEREITRFFVDRGFLEIKSPILIPLEYIERMGIDNDTELSKQIFRVDKNFCLRPMLAPNLANYLRKLDRALPDPIKIFEIGPCYRKESDGKEHLEEFTMLNFCQMGSGCTRENLESIITDFLNHLGIDFKIVGDSCMVFGDTLDVMHGDLELSSAVVGPIPLDREWGIDKPWIGAGFGLERLLKVKHDFKNIKRAARSESYYNGISTNL

SEQ ID NO: 45 - DNA, 4020 bp, Artificial Sequence
  Description of Artificial Sequence: Synthetic polynucleotide
  SPD5-MCP
  CDS (1)..(4020)
atggaggacaacagcgtgctgaacgaggacagcaacctggagcacgtggagggccagcccagaagaagcatgagccagcccgtgctgaacgtggagggcgacaagagaaccagcagcaccagcgccacccagcagcaggtgctgagcggcgccttcagcagcgccgacgtgagaagcatccccatcatccagacctgggaggagaacaaggccctgaagaccaagatcaccatcctgagaggcgagctgcagatgtaccagagaagatacagcgaggccaaggaggccagccagaagagagtgaaggaggtgatggacgactacgtggacctgaagctgggccaggagaacgtgcaggagaagatggagcagtacaagctgatggaggaggacctgctggccatgcagagcagaatcgagaccagcgaggacaacttcgccagacagatgaaggagttcgaggcccagaagcacgccatggaggagagaatcaaggagctggagctgagcgccaccgacgccaacaacaccaccgtgggcagcttcagaggcaccctggacgacatcctgaagaagaacgaccccgacttcaccctgaccagcggctacgaggagagaaagatcaacgacctggaggccaagctgctgagcgagatcgacaaggtggccgagctggaggaccacatccagcagctgagacaggagctggacgaccagagcgccagactggccgacagcgagaacgtgagagcccagctggaggccgccaccggccagggcatcctgggcgccgccggcaacgccatggtgcccaacagcaccttcatgatcggcaacggcagagagagccagaccagagaccagctgaactacatcgacgacctggagaccaagctggccgacgccaagaaggagaacgacaaggccagacaggccctggtggagtacatgaacaagtgcagcaagctggagcacgagatcagaaccatggtgaagaacagcaccttcgacagcagcagcatgctgctgggcggccagaccagcgacgagctgaagatccagatcggcaaggtgaacggcgagctgaacgtgctgagagccgagaacagagagctgagaatcagatgcgaccagctgaccggcggcgacggcaacctgagcatcagcctgggccagagcagactgatggccggcatcgccaccaacgacgtggacagcatcggccagggcaacgagaccggcggcaccagcatgagaatcctgcccagagagagccagctggacgacctggaggagagcaagctgcccctgatggacaccagcagcgccgtgagaaaccagcagcagttcgccagcatgtgggaggacttcgagagcgtgaaggacagcctgcagaacaaccacaacgacaccctggagggcagcttcaacagcagcatgcccccccccggcagagacgccacccagagcttcctgagccagaagagcttcaagaacagccccatcgtgatgcagaagcccaagagcctgcacctgcacctgaagagccaccagagcgagggcgccggcgagcagatccagaacaacagcttcagcaccaagaccgccagcccccacgtgagccagagccacatccccatcctgcacgacatgcagcagatcctggacagcagcgccatgttcctggagggccagcacgacgtggccgtgaacgtggagcagatgcaggagaagatgagccagatcagagaggccctggccagactgttcgagagactgaagagcagcgccgccctgttcgaggagatcctggagagaatgggcagcagcgaccccaacgccgacaagatcaagaagatgaagctggccttcgagaccagcatcaacgacaagctgaacgtgagcgccatcctggaggccgccgagaaggacctgcacaacatgagcctgaacttcagcatcctggagaagagcatcgtgagccaggccgccgaggccagcagaagattcaccatcgcccccgacgccgaggacgtggccagcagcagcctgctgaacgccagctacagccccctgttcaagttcaccagcaacagcgacatcgtggagaagctgcagaacgaggtgagcgagctgaagaacgagctggagatggccagaaccagagacatgagaagccccctgaacggcagcagcggcagactgagcgacgtgcagatcaacaccaacagaatgttcgaggacctggaggtgagcgaggccaccctgcagaaggccaaggaggagaacagcaccctgaagagccagttcgccgagctggaggccaacctgcaccaggtgaacagcaagctgggcgaggtgagatgcgagctgaacgaggccctggccagagtggacggcgagcaggagaccagagtgaaggccgagaacgccctggaggaggccagacagctgatcagcagcctgaagcacgaggagaacgagctgaagaagaccatcaccgacatgggcatgagactgaacgaggccaagaagagcgacgagttcctgaagagcgagctgagcaccgccctggaggaggagaagaagagccagaacctggccgacgagctgagcgaggagctgaacggctggagaatgagaaccaaggaggccgagaacaaggtggagcacgccagcagcgagaagagcgagatgctggagagaatcgtgcacctggagaccgagatggagaagctgagcaccagcgagatcgccgccgactactgcagcaccaagatgaccgagagaaagaaggagatcgagctggccaagtacagagaggacttcgagaacgccgccatcgtgggcctggagagaatcagcaaggagatcagcgagctgaccaagaagaccctgaaggccaagatcatccccagcaacatcagcagcatccagctggtgtgcgacgagctgtgcagaagactgagcagagagagagagcagcagcacgagtacgccaaggtgatgagagacgtgaacgagaagatcgagaagctgcagctggagaaggacgccctggagcacgagctgaagatgatgagcagcaacaacgagaacgtgccccccgtgggcaccagcgtgagcggcatgcccaccaagaccagcaaccagaagtgcgcccagccccactacaccagccccaccagacagctgctgcacgagagcaccatggccgtggacgccatcgtgcagaagctgaagaagacccacaacatgagcggcatgggccccgagctgaaggagaccatcggcaacgtgatcaacgagagcagagtgctgagagacttcctgcaccagaagctgatcctgttcaagggcatcgacatgagcaactggaagaacgagaccgtggaccagctgatcaccgacctgggccagctgcaccaggacaacctgatgctggaggagcagatcaagaagtacaagaaggagctgaagctgaccaagagcgccatccccaccctgggcgtggagttccaggacagaatcaagaccgagatcggcaagatcgccaccgacatgggcggcgccgtgaaggagatcagaaagaagggtaccgagcagaagctgatctcagaggaggacctgggcgcccccggctccgccggctccgccgccggctccggcgcttctaactttactcagttcgttctcgtcgacaatggcggaactggcgacgtgactgtcgccccaagcaacttcgctaacgggatcgctgaatggatcagctctaactcgcgttcacaggcttacaaagtaacctgtagcgttcgtcagagctctgcgcagaatcgcaaatacaccatcaaagtcgaggtgcctaaaggcgcctggcgttcgtacttaaatatggaactaaccattccaattttcgccacgaattccgactgcgagcttattgttaaggcaatgcaaggtctcctaaaagatggaaacccgattccctcagcaatcgcagcaaactccggcatctactaa

SEQ ID NO: 46 - protein, 1339 aa, Artificial Sequence
  Description of Artificial Sequence: Synthetic polypeptide
  SPD5-MCP
MEDNSVLNEDSNLEHVEGQPRRSMSQPVLNVEGDKRTSSTSATQQQVLSGAFSSADVRSIPIIQTWEENKALKTKITILRGELQMYQRRYSEAKEASQKRVKEVMDDYVDLKLGQENVQEKMEQYKLMEEDLLAMQSRIETSEDNFARQMKEFEAQKHAMEERIKELELSATDANNTTVGSFRGTLDDILKKNDPDFTLTSGYEERKINDLEAKLLSEIDKVAELEDHIQQLRQELDDQSARLADSENVRAQLEAATGQGILGAAGNAMVPNSTFMIGNGRESQTRDQLNYIDDLETKLADAKKENDKARQALVEYMNKCSKLEHEIRTMVKNSTFDSSSMLLGGQTSDELKIQIGKVNGELNVLRAENRELRIRCDQLTGGDGNLSISLGQSRLMAGIATNDVDSIGQGNETGGTSMRILPRESQLDDLEESKLPLMDTSSAVRNQQQFASMWEDFESVKDSLQNNHNDTLEGSFNSSMPPPGRDATQSFLSQKSFKNSPIVMQKPKSLHLHLKSHQSEGAGEQIQNNSFSTKTASPHVSQSHIPILHDMQQILDSSAMFLEGQHDVAVNVEQMQEKMSQIREALARLFERLKSSAALFEEILERMGSSDPNADKIKKMKLAFETSINDKLNVSAILEAAEKDLHNMSLNFSILEKSIVSQAAEASRRFTIAPDAEDVASSSLLNASYSPLFKFTSNSDIVEKLQNEVSELKNELEMARTRDMRSPLNGSSGRLSDVQINTNRMFEDLEVSEATLQKAKEENSTLKSQFAELEANLHQVNSKLGEVRCELNEALARVDGEQETRVKAENALEEARQLISSLKHEENELKKTITDMGMRLNEAKKSDEFLKSELSTALEEEKKSQNLADELSEELNGWRMRTKEAENKVEHASSEKSEMLERIVHLETEMEKLSTSEIAADYCSTKMTERKKEIELAKYREDFENAAIVGLERISKEISELTKKTLKAKIIPSNISSIQLVCDELCRRLSREREQQHEYAKVMRDVNEKIEKLQLEKDALEHELKMMSSNNENVPPVGTSVSGMPTKTSNQKCAQPHYTSPTRQLLHESTMAVDAIVQKLKKTHNMSGMGPELKETIGNVINESRVLRDFLHQKLILFKGIDMSNWKNETVDQLITDLGQLHQDNLMLEEQIKKYKKELKLTKSAIPTLGVEFQDRIKTEIGKIATDMGGAVKEIRKKGTEQKLISEEDLGAPGSAGSAAGSGASNFTQFVLVDNGGTGDVTVAPSNFANGIAEWISSNSRSQAYKVTCSVRQSSAQNRKYTIKVEVPKGAWRSYLNMELTIPIFATNSDCELIVKAMQGLLKDGNPIPSAIAANSGIY

SEQ ID NO: 47 - DNA, 5052 bp, Artificial Sequence
  Description of Artificial Sequence: Synthetic polynucleotide
  SPD5-PylRS AF
  CDS (1)..(5052)
atggaggacaacagcgtgctgaacgaggacagcaacctggagcacgtggagggccagcccagaagaagcatgagccagcccgtgctgaacgtggagggcgacaagagaaccagcagcaccagcgccacccagcagcaggtgctgagcggcgccttcagcagcgccgacgtgagaagcatccccatcatccagacctgggaggagaacaaggccctgaagaccaagatcaccatcctgagaggcgagctgcagatgtaccagagaagatacagcgaggccaaggaggccagccagaagagagtgaaggaggtgatggacgactacgtggacctgaagctgggccaggagaacgtgcaggagaagatggagcagtacaagctgatggaggaggacctgctggccatgcagagcagaatcgagaccagcgaggacaacttcgccagacagatgaaggagttcgaggcccagaagcacgccatggaggagagaatcaaggagctggagctgagcgccaccgacgccaacaacaccaccgtgggcagcttcagaggcaccctggacgacatcctgaagaagaacgaccccgacttcaccctgaccagcggctacgaggagagaaagatcaacgacctggaggccaagctgctgagcgagatcgacaaggtggccgagctggaggaccacatccagcagctgagacaggagctggacgaccagagcgccagactggccgacagcgagaacgtgagagcccagctggaggccgccaccggccagggcatcctgggcgccgccggcaacgccatggtgcccaacagcaccttcatgatcggcaacggcagagagagccagaccagagaccagctgaactacatcgacgacctggagaccaagctggccgacgccaagaaggagaacgacaaggccagacaggccctggtggagtacatgaacaagtgcagcaagctggagcacgagatcagaaccatggtgaagaacagcaccttcgacagcagcagcatgctgctgggcggccagaccagcgacgagctgaagatccagatcggcaaggtgaacggcgagctgaacgtgctgagagccgagaacagagagctgagaatcagatgcgaccagctgaccggcggcgacggcaacctgagcatcagcctgggccagagcagactgatggccggcatcgccaccaacgacgtggacagcatcggccagggcaacgagaccggcggcaccagcatgagaatcctgcccagagagagccagctggacgacctggaggagagcaagctgcccctgatggacaccagcagcgccgtgagaaaccagcagcagttcgccagcatgtgggaggacttcgagagcgtgaaggacagcctgcagaacaaccacaacgacaccctggagggcagcttcaacagcagcatgcccccccccggcagagacgccacccagagcttcctgagccagaagagcttcaagaacagccccatcgtgatgcagaagcccaagagcctgcacctgcacctgaagagccaccagagcgagggcgccggcgagcagatccagaacaacagcttcagcaccaagaccgccagcccccacgtgagccagagccacatccccatcctgcacgacatgcagcagatcctggacagcagcgccatgttcctggagggccagcacgacgtggccgtgaacgtggagcagatgcaggagaagatgagccagatcagagaggccctggccagactgttcgagagactgaagagcagcgccgccctgttcgaggagatcctggagagaatgggcagcagcgaccccaacgccgacaagatcaagaagatgaagctggccttcgagaccagcatcaacgacaagctgaacgtgagcgccatcctggaggccgccgagaaggacctgcacaacatgagcctgaacttcagcatcctggagaagagcatcgtgagccaggccgccgaggccagcagaagattcaccatcgcccccgacgccgaggacgtggccagcagcagcctgctgaacgccagctacagccccctgttcaagttcaccagcaacagcgacatcgtggagaagctgcagaacgaggtgagcgagctgaagaacgagctggagatggccagaaccagagacatgagaagccccctgaacggcagcagcggcagactgagcgacgtgcagatcaacaccaacagaatgttcgaggacctggaggtgagcgaggccaccctgcagaaggccaaggaggagaacagcaccctgaagagccagttcgccgagctggaggccaacctgcaccaggtgaacagcaagctgggcgaggtgagatgcgagctgaacgaggccctggccagagtggacggcgagcaggagaccagagtgaaggccgagaacgccctggaggaggccagacagctgatcagcagcctgaagcacgaggagaacgagctgaagaagaccatcaccgacatgggcatgagactgaacgaggccaagaagagcgacgagttcctgaagagcgagctgagcaccgccctggaggaggagaagaagagccagaacctggccgacgagctgagcgaggagctgaacggctggagaatgagaaccaaggaggccgagaacaaggtggagcacgccagcagcgagaagagcgagatgctggagagaatcgtgcacctggagaccgagatggagaagctgagcaccagcgagatcgccgccgactactgcagcaccaagatgaccgagagaaagaaggagatcgagctggccaagtacagagaggacttcgagaacgccgccatcgtgggcctggagagaatcagcaaggagatcagcgagctgaccaagaagaccctgaaggccaagatcatccccagcaacatcagcagcatccagctggtgtgcgacgagctgtgcagaagactgagcagagagagagagcagcagcacgagtacgccaaggtgatgagagacgtgaacgagaagatcgagaagctgcagctggagaaggacgccctggagcacgagctgaagatgatgagcagcaacaacgagaacgtgccccccgtgggcaccagcgtgagcggcatgcccaccaagaccagcaaccagaagtgcgcccagccccactacaccagccccaccagacagctgctgcacgagagcaccatggccgtggacgccatcgtgcagaagctgaagaagacccacaacatgagcggcatgggccccgagctgaaggagaccatcggcaacgtgatcaacgagagcagagtgctgagagacttcctgcaccagaagctgatcctgttcaagggcatcgacatgagcaactggaagaacgagaccgtggaccagctgatcaccgacctgggccagctgcaccaggacaacctgatgctggaggagcagatcaagaagtacaagaaggagctgaagctgaccaagagcgccatccccaccctgggcgtggagttccaggacagaatcaagaccgagatcggcaagatcgccaccgacatgggcggcgccgtgaaggagatcagaaagaagggtaccggcgcccccggctccgccggctccgccgccggctccggcgcgtgcccggtgccgctgcagctgccgccgctggaacgcctgaccctggatgataaaaaaccgctgaataccctgatctctgctactggtctgtggatgagtcgtaccggaaccattcataaaatcaaacaccacgaggttagccgttcgaaaatctatattgagatggcgtgtggcgatcatctggttgtgaacaatagccgctcttctcgtacagcacgtgcactgcgtcaccacaaatatcgtaaaacctgtaaacgttgccgtgtgtccgatgaggatctgaacaaattcctgacaaaagccaatgaggaccaaacaagcgtgaaagtgaaagtcgttagcgctcctacccgtactaaaaaagcaatgccgaaatccgttgctcgtgcccctaaaccactggaaaacactgaagcagcacaggcacagccgtctggaagcaaattctctccggccattcctgtttctacccaggagtccgtttctgttccagcaagtgtgagcaccagcattagcagtattagcaccggtgccaccgctagcgccctggttaaaggcaataccaatccgattacaagcatgtctgccccggttcaagcatcagctccagcactgacaaaatcccaaaccgatcgtctggaggttctgctgaatccgaaagacgaaatcagcctgaattccggcaaaccgtttcgtgaactggagagcgaactgctgtcacgtcgtaaaaaagacctgcaacaaatctatgccgaagaacgtgagaactatctggggaaactggaacgtgaaatcacccgctttttcgtggatcgtggctttctggagatcaaatccccgattctgattcctctggagtatatcgagcgtatgggcatcgacaatgataccgaactgagcaaacaaattttccgtgtggataaaaacttctgtctgcgccctatgctagcaccaaatctggctaactatctgcgcaaactggaccgtgccctgcctgatcctatcaaaatcttcgagatcggcccgtgttatcgtaaagagtccgacggtaaagaacatctggaggagtttaccatgctgaacttttgccaaatgggttcaggttgtactcgtgagaacctggaaagcatcatcaccgattttctgaaccacctgggcattgacttcaaaattgtgggcgacagctgtatggtgtttggcgacaccctggatgtcatgcacggcgacctggaactgtctagtgccgttgtgggcccaatcccgctggatcgtgagtggggtatcgacaaaccttggatcggtgcgggttttggtctggagcgtctgctgaaagtaaaacacgacttcaagaacatcaaacgtgctgcacgttccgagtcctattacaatggtatttctactaacctgtaa

SEQ ID NO: 48 - protein, 1683 aa, Artificial Sequence
  Description of Artificial Sequence: Synthetic polypeptide
  SPD5-PylRS AF
MEDNSVLNEDSNLEHVEGQPRRSMSQPVLNVEGDKRTSSTSATQQQVLSGAFSSADVRSIPIIQTWEENKALKTKITILRGELQMYQRRYSEAKEASQKRVKEVMDDYVDLKLGQENVQEKMEQYKLMEEDLLAMQSRIETSEDNFARQMKEFEAQKHAMEERIKELELSATDANNTTVGSFRGTLDDILKKNDPDFTLTSGYEERKINDLEAKLLSEIDKVAELEDHIQQLRQELDDQSARLADSENVRAQLEAATGQGILGAAGNAMVPNSTFMIGNGRESQTRDQLNYIDDLETKLADAKKENDKARQALVEYMNKCSKLEHEIRTMVKNSTFDSSSMLLGGQTSDELKIQIGKVNGELNVLRAENRELRIRCDQLTGGDGNLSISLGQSRLMAGIATNDVDSIGQGNETGGTSMRILPRESQLDDLEESKLPLMDTSSAVRNQQQFASMWEDFESVKDSLQNNHNDTLEGSFNSSMPPPGRDATQSFLSQKSFKNSPIVMQKPKSLHLHLKSHQSEGAGEQIQNNSFSTKTASPHVSQSHIPILHDMQQILDSSAMFLEGQHDVAVNVEQMQEKMSQIREALARLFERLKSSAALFEEILERMGSSDPNADKIKKMKLAFETSINDKLNVSAILEAAEKDLHNMSLNFSILEKSIVSQAAEASRRFTIAPDAEDVASSSLLNASYSPLFKFTSNSDIVEKLQNEVSELKNELEMARTRDMRSPLNGSSGRLSDVQINTNRMFEDLEVSEATLQKAKEENSTLKSQFAELEANLHQVNSKLGEVRCELNEALARVDGEQETRVKAENALEEARQLISSLKHEENELKKTITDMGMRLNEAKKSDEFLKSELSTALEEEKKSQNLADELSEELNGWRMRTKEAENKVEHASSEKSEMLERIVHLETEMEKLSTSEIAADYCSTKMTERKKEIELAKYREDFENAAIVGLERISKEISELTKKTLKAKIIPSNISSIQLVCDELCRRLSREREQQHEYAKVMRDVNEKIEKLQLEKDALEHELKMMSSNNENVPPVGTSVSGMPTKTSNQKCAQPHYTSPTRQLLHESTMAVDAIVQKLKKTHNMSGMGPELKETIGNVINESRVLRDFLHQKLILFKGIDMSNWKNETVDQLITDLGQLHQDNLMLEEQIKKYKKELKLTKSAIPTLGVEFQDRIKTEIGKIATDMGGAVKEIRKKGTGAPGSAGSAAGSGACPVPLQLPPLERLTLDDKKPLNTLISATGLWMSRTGTIHKIKHHEVSRSKIYIEMACGDHLVVNNSRSSRTARALRHHKYRKTCKRCRVSDEDLNKFLTKANEDQTSVKVKVVSAPTRTKKAMPKSVARAPKPLENTEAAQAQPSGSKFSPAIPVSTQESVSVPASVSTSISSISTGATASALVKGNTNPITSMSAPVQASAPALTKSQTDRLEVLLNPKDEISLNSGKPFRELESELLSRRKKDLQQIYAEERENYLGKLEREITRFFVDRGFLEIKSPILIPLEYIERMGIDNDTELSKQIFRVDKNFCLRPMLAPNLANYLRKLDRALPDPIKIFEIGPCYRKESDGKEHLEEFTMLNFCQMGSGCTRENLESIITDFLNHLGIDFKIVGDSCMVFGDTLDVMHGDLELSSAVVGPIPLDREWGIDKPWIGAGFGLERLLKVKHDFKNIKRAARSESYYNGISTNL

SEQ ID NO: 49 - DNA, 4188 bp, Artificial Sequence
  Description of Artificial Sequence: Synthetic polynucleotide
  KIF16B-FUS-PylRS AF
  CDS (1)..(4188)
atggcatcggtcaaggtggccgtgagggtccggcccatgaatcgcagggaaaaggacttggaggccaagttcattattcagatggagaaaagcaaaacgacaatcacaaacttaaagataccagaaggaggcactggggactcaggaagagaacggaccaagaccttcacctatgacttttctttttattctgctgatacaaaaagcccagattacgtttcacaagaaatggttttcaaaaccctcggcacagatgtcgtgaagtctgcatttgaaggttataatgcttgtgtctttgcatatgggcaaactggatctggaaagtcatacactatgatgggaaattctggagattctggcttaatacctcggatctgtgaaggactcttcagtcggataaatgaaaccaccagatgggatgaagcttcttttcgaactgaagtcagctacttagaaatttataacgaacgtgtgagagatctacttcggcggaagtcatctaaaaccttcaatttgagagtccgtgagcatcccaaagaaggcccttatgttgaggatttatccaaacatttagtacagaattatggtgacgtagaagaacttatggatgcgggcaatatcaaccggaccaccgcagcgactgggatgaacgacgtcagtagcaggtctcatgccatcttcaccatcaagttcactcaggctaaatttgattctgaaatgccatgtgaaaccgtcagtaagatccacttggttgatcttgccggaagtgagcgtgcagatgccaccggagccaccggggttaggctaaaggaagggggaaatattaacaagtccctcgtgactctggggaacgtcatttctgccttagctgatttatctcaggatgctgcaaatactcttgcaaagaagaagcaagttttcgtgccttacagggattctgtgttgacttggttgttaaaagatagccttggaggaaactctaaaactatcatgattgccaccatttcacctgctgatgtcaattatggagaaaccctaagtactcttcgctatgcaaatagagccaaaaacatcatcaacaagcctaccattaatgaggatgccaacgtcaaacttatccgtgagctgcgagctgaaatagccagactgaaaacgctgcttgctcaagggaatcagattgccctcttagactcccccacatatacagatattgaaatgaacagattgggaaagggcgcccccggctccgccggctccgccgccggctccggcatggcctcaaacgattatacccaacaagcaacccaaagctatggggcctaccccacccagcccgggcagggctattcccagcagagcagtcagccctacggacagcagagttacagtggttatagccagtccacggacacttcaggatatggccagagcagctattcttcttatggccagagccagaacacaggctatggaactcagtcaactccccagggatatggctcgactggcggctatggcagtagccagagctcccaatcgtcttacgggcagcagtcctcctaccctggctatggccagcagccagctcccagcagcacctcgggaagttacggtagcagttctcagagcagcagctatgggcagccccagagtgggagctacagccagcagcctagctatggtggacagcagcaaagctatggacagcagcaaagctataatccccctcagggctatggacagcagaaccagtacaacagcagcagtggtggtggaggtggaggtggaggtggaggtaactatggccaagatcaatcctccatgagtagtggtggtggcagtggtggcggttatggcaatcaagaccagagtggtggaggtggcagcggtggctatggacagcaggaccgtggaggccgcggcaggggtggcagtggtggcggcggcggcggcggcggtggtggttacaaccgcagcagtggtggctatgaacccagaggtcgtggaggtggccgtggaggcagaggtggcatgggcggaagtgaccgtggtggcttcaataaatttggtggccctcgggaccaaggatcacgtcatgactccgaacaggataattcagacaacaacaccatctttgtgcaaggcctgggtgagaatgttacaattgagtctgtggctgattacttcaagcagattggtattattaagacaaacaagaaaacgggacagcccatgattaatttgtacacagacagggaaactggcaagctgaagggagaggcaacggtctcttttgatgacccaccttcagctaaagcagctattgactggtttgatggtaaagaattctccggaaatcctatcaaggtctcatttgctactcgccgggcagactttaatcggggtggtggcaatggtcgtggaggccgagggcgaggaggacccatgggccgtggaggctatggaggtggtggcagtggtggtggtggccgaggaggatttcccagtggaggtggtggcggtggaggacagcagcgagctggtgactggaagtgtcctaatcccacctgtgagaatatgaacttctcttggaggaatgaatgcaaccagtgtaaggcccctaaaccagatggcccaggagggggaccaggtggctctcacatggggggtaactacggggatgatcgtcgtggtggcagaggaggcgattacaaggatgacgacgataagggtaccggcgcccccggctccgccggctccgccgccggctccggcgcgtgcccggtgccgctgcagctgccgccgctggaacgcctgaccctggatgataaaaaaccgctgaataccctgatctctgctactggtctgtggatgagtcgtaccggaaccattcataaaatcaaacaccacgaggttagccgttcgaaaatctatattgagatggcgtgtggcgatcatctggttgtgaacaatagccgctcttctcgtacagcacgtgcactgcgtcaccacaaatatcgtaaaacctgtaaacgttgccgtgtgtccgatgaggatctgaacaaattcctgacaaaagccaatgaggaccaaacaagcgtgaaagtgaaagtcgttagcgctcctacccgtactaaaaaagcaatgccgaaatccgttgctcgtgcccctaaaccactggaaaacactgaagcagcacaggcacagccgtctggaagcaaattctctccggccattcctgtttctacccaggagtccgtttctgttccagcaagtgtgagcaccagcattagcagtattagcaccggtgccaccgctagcgccctggttaaaggcaataccaatccgattacaagcatgtctgccccggttcaagcatcagctccagcactgacaaaatcccaaaccgatcgtctggaggttctgctgaatccgaaagacgaaatcagcctgaattccggcaaaccgtttcgtgaactggagagcgaactgctgtcacgtcgtaaaaaagacctgcaacaaatctatgccgaagaacgtgagaactatctggggaaactggaacgtgaaatcacccgctttttcgtggatcgtggctttctggagatcaaatccccgattctgattcctctggagtatatcgagcgtatgggcatcgacaatgataccgaactgagcaaacaaattttccgtgtggataaaaacttctgtctgcgccctatgctagcaccaaatctggctaactatctgcgcaaactggaccgtgccctgcctgatcctatcaaaatcttcgagatcggcccgtgttatcgtaaagagtccgacggtaaagaacatctggaggagtttaccatgctgaacttttgccaaatgggttcaggttgtactcgtgagaacctggaaagcatcatcaccgattttctgaaccacctgggcattgacttcaaaattgtgggcgacagctgtatggtgtttggcgacaccctggatgtcatgcacggcgacctggaactgtctagtgccgttgtgggcccaatcccgctggatcgtgagtggggtatcgacaaaccttggatcggtgcgggttttggtctggagcgtctgctgaaagtaaaacacgacttcaagaacatcaaacgtgctgcacgttccgagtcctattacaatggtatttctactaacctgtaa

SEQ ID NO: 50 - protein, 1395 aa, Artificial Sequence
  Description of Artificial Sequence: Synthetic polypeptide
  KIF16B-FUS-PylRS AF
MASVKVAVRVRPMNRREKDLEAKFIIQMEKSKTTITNLKIPEGGTGDSGRERTKTFTYDFSFYSADTKSPDYVSQEMVFKTLGTDVVKSAFEGYNACVFAYGQTGSGKSYTMMGNSGDSGLIPRICEGLFSRINETTRWDEASFRTEVSYLEIYNERVRDLLRRKSSKTFNLRVREHPKEGPYVEDLSKHLVQNYGDVEELMDAGNINRTTAATGMNDVSSRSHAIFTIKFTQAKFDSEMPCETVSKIHLVDLAGSERADATGATGVRLKEGGNINKSLVTLGNVISALADLSQDAANTLAKKKQVFVPYRDSVLTWLLKDSLGGNSKTIMIATISPADVNYGETLSTLRYANRAKNIINKPTINEDANVKLIRELRAEIARLKTLLAQGNQIALLDSPTYTDIEMNRLGKGAPGSAGSAAGSGMASNDYTQQATQSYGAYPTQPGQGYSQQSSQPYGQQSYSGYSQSTDTSGYGQSSYSSYGQSQNTGYGTQSTPQGYGSTGGYGSSQSSQSSYGQQSSYPGYGQQPAPSSTSGSYGSSSQSSSYGQPQSGSYSQQPSYGGQQQSYGQQQSYNPPQGYGQQNQYNSSSGGGGGGGGGGNYGQDQSSMSSGGGSGGGYGNQDQSGGGGSGGYGQQDRGGRGRGGSGGGGGGGGGGYNRSSGGYEPRGRGGGRGGRGGMGGSDRGGFNKFGGPRDQGSRHDSEQDNSDNNTIFVQGLGENVTIESVADYFKQIGIIKTNKKTGQPMINLYTDRETGKLKGEATVSFDDPPSAKAAIDWFDGKEFSGNPIKVSFATRRADFNRGGGNGRGGRGRGGPMGRGGYGGGGSGGGGRGGFPSGGGGGGGQQRAGDWKCPNPTCENMNFSWRNECNQCKAPKPDGPGGGPGGSHMGGNYGDDRRGGRGGDYKDDDDKGTGAPGSAGSAAGSGACPVPLQLPPLERLTLDDKKPLNTLISATGLWMSRTGTIHKIKHHEVSRSKIYIEMACGDHLVVNNSRSSRTARALRHHKYRKTCKRCRVSDEDLNKFLTKANEDQTSVKVKVVSAPTRTKKAMPKSVARAPKPLENTEAAQAQPSGSKFSPAIPVSTQESVSVPASVSTSISSISTGATASALVKGNTNPITSMSAPVQASAPALTKSQTDRLEVLLNPKDEISLNSGKPFRELESELLSRRKKDLQQIYAEERENYLGKLEREITRFFVDRGFLEIKSPILIPLEYIERMGIDNDTELSKQIFRVDKNFCLRPMLAPNLANYLRKLDRALPDPIKIFEIGPCYRKESDGKEHLEEFTMLNFCQMGSGCTRENLESIITDFLNHLGIDFKIVGDSCMVFGDTLDVMHGDLELSSAVVGPIPLDREWGIDKPWIGAGFGLERLLKVKHDFKNIKRAARSESYYNGISTNL

SEQ ID NO: 51 - DNA, 4167 bp, Artificial Sequence
  Description of Artificial Sequence: Synthetic polynucleotide
  KIF16B-VSV-G-FUS-PylRS AF
  CDS (1)..(4167)
atggcatcggtcaaggtggccgtgagggtccggcccatgaatcgcagggaaaaggacttggaggccaagttcattattcagatggagaaaagcaaaacgacaatcacaaacttaaagataccagaaggaggcactggggactcaggaagagaacggaccaagaccttcacctatgacttttctttttattctgctgatacaaaaagcccagattacgtttcacaagaaatggttttcaaaaccctcggcacagatgtcgtgaagtctgcatttgaaggttataatgcttgtgtctttgcatatgggcaaactggatctggaaagtcatacactatgatgggaaattctggagattctggcttaatacctcggatctgtgaaggactcttcagtcggataaatgaaaccaccagatgggatgaagcttcttttcgaactgaagtcagctacttagaaatttataacgaacgtgtgagagatctacttcggcggaagtcatctaaaaccttcaatttgagagtccgtgagcatcccaaagaaggcccttatgttgaggatttatccaaacatttagtacagaattatggtgacgtagaagaacttatggatgcgggcaatatcaaccggaccaccgcagcgactgggatgaacgacgtcagtagcaggtctcatgccatcttcaccatcaagttcactcaggctaaatttgattctgaaatgccatgtgaaaccgtcagtaagatccacttggttgatcttgccggaagtgagcgtgcagatgccaccggagccaccggggttaggctaaaggaagggggaaatattaacaagtccctcgtgactctggggaacgtcatttctgccttagctgatttatctcaggatgctgcaaatactcttgcaaagaagaagcaagttttcgtgccttacagggattctgtgttgacttggttgttaaaagatagccttggaggaaactctaaaactatcatgattgccaccatttcacctgctgatgtcaattatggagaaaccctaagtactcttcgctatgcaaatagagccaaaaacatcatcaacaagcctaccattaatgaggatgccaacgtcaaacttatccgtgagctgcgagctgaaatagccagactgaaaacgctgcttgctcaagggaatcagattgccctcttagactcccccacatatacagatattgaaatgaacagattgggaaagggcgcccccggctccgccggctccgccgccggctccggcatggcctcaaacgattatacccaacaagcaacccaaagctatggggcctaccccacccagcccgggcagggctattcccagcagagcagtcagccctacggacagcagagttacagtggttatagccagtccacggacacttcaggatatggccagagcagctattcttcttatggccagagccagaacacaggctatggaactcagtcaactccccagggatatggctcgactggcggctatggcagtagccagagctcccaatcgtcttacgggcagcagtcctcctaccctggctatggccagcagccagctcccagcagcacctcgggaagttacggtagcagttctcagagcagcagctatgggcagccccagagtgggagctacagccagcagcctagctatggtggacagcagcaaagctatggacagcagcaaagctataatccccctcagggctatggacagcagaaccagtacaacagcagcagtggtggtggaggtggaggtggaggtggaggtaactatggccaagatcaatcctccatgagtagtggtggtggcagtggtggcggttatggcaatcaagaccagagtggtggaggtggcagcggtggctatggacagcaggaccgtggaggccgcggcaggggtggcagtggtggcggcggcggcggcggcggtggtggttacaaccgcagcagtggtggctatgaacccagaggtcgtggaggtggccgtggaggcagaggtggcatgggcggaagtgaccgtggtggcttcaataaatttggtggccctcgggaccaaggatcacgtcatgactccgaacaggataattcagacaacaacaccatctttgtgcaaggcctgggtgagaatgttacaattgagtctgtggctgattacttcaagcagattggtattattaagacaaacaagaaaacgggacagcccatgattaatttgtacacagacagggaaactggcaagctgaagggagaggcaacggtctcttttgatgacccaccttcagctaaagcagctattgactggtttgatggtaaagaattctccggaaatcctatcaaggtctcatttgctactcgccgggcagactttaatcggggtggtggcaatggtcgtggaggccgagggcgaggaggacccatgggccgtggaggctatggaggtggtggcagtggtggtggtggccgaggaggatttcccagtggaggtggtggcggtggaggacagcagcgagctggtgactggaagtgtcctaatcccacctgtgagaatatgaacttctcttggaggaatgaatgcaaccagtgtaaggcccctaaaccagatggcccaggagggggaccaggtggctctcacatggggggtaactacggggatgatcgtcgtggtggcagaggtggtgcgatcgcaggagcaccaggaagtgctggttctgctgctggtagtggagcgtgcccggtgccgctgcagctgccgccgctggaacgcctgaccctggatgataaaaaaccgctgaataccctgatctctgctactggtctgtggatgagtcgtaccggaaccattcataaaatcaaacaccacgaggttagccgttcgaaaatctatattgagatggcgtgtggcgatcatctggttgtgaacaatagccgctcttctcgtacagcacgtgcactgcgtcaccacaaatatcgtaaaacctgtaaacgttgccgtgtgtccgatgaggatctgaacaaattcctgacaaaagccaatgaggaccaaacaagcgtgaaagtgaaagtcgttagcgctcctacccgtactaaaaaagcaatgccgaaatccgttgctcgtgcccctaaaccactggaaaacactgaagcagcacaggcacagccgtctggaagcaaattctctccggccattcctgtttctacccaggagtccgtttctgttccagcaagtgtgagcaccagcattagcagtattagcaccggtgccaccgctagcgccctggttaaaggcaataccaatccgattacaagcatgtctgccccggttcaagcatcagctccagcactgacaaaatcccaaaccgatcgtctggaggttctgctgaatccgaaagacgaaatcagcctgaattccggcaaaccgtttcgtgaactggagagcgaactgctgtcacgtcgtaaaaaagacctgcaacaaatctatgccgaagaacgtgagaactatctggggaaactggaacgtgaaatcacccgctttttcgtggatcgtggctttctggagatcaaatccccgattctgattcctctggagtatatcgagcgtatgggcatcgacaatgataccgaactgagcaaacaaattttccgtgtggataaaaacttctgtctgcgccctatgctagcaccaaatctggctaactatctgcgcaaactggaccgtgccctgcctgatcctatcaaaatcttcgagatcggcccgtgttatcgtaaagagtccgacggtaaagaacatctggaggagtttaccatgctgaacttttgccaaatgggttcaggttgtactcgtgagaacctggaaagcatcatcaccgattttctgaaccacctgggcattgacttcaaaattgtgggcgacagctgtatggtgtttggcgacaccctggatgtcatgcacggcgacctggaactgtctagtgccgttgtgggcccaatcccgctggatcgtgagtggggtatcgacaaaccttggatcggtgcgggttttggtctggagcgtctgctgaaagtaaaacacgacttcaagaacatcaaacgtgctgcacgttccgagtcctattacaatggtatttctactaacctgtaa

SEQ ID NO: 52 - protein, 1388 aa, Artificial Sequence
  Description of Artificial Sequence: Synthetic polypeptide
  KIF16B-VSV-G-FUS-PylRS AF
MASVKVAVRVRPMNRREKDLEAKFIIQMEKSKTTITNLKIPEGGTGDSGRERTKTFTYDFSFYSADTKSPDYVSQEMVFKTLGTDVVKSAFEGYNACVFAYGQTGSGKSYTMMGNSGDSGLIPRICEGLFSRINETTRWDEASFRTEVSYLEIYNERVRDLLRRKSSKTFNLRVREHPKEGPYVEDLSKHLVQNYGDVEELMDAGNINRTTAATGMNDVSSRSHAIFTIKFTQAKFDSEMPCETVSKIHLVDLAGSERADATGATGVRLKEGGNINKSLVTLGNVISALADLSQDAANTLAKKKQVFVPYRDSVLTWLLKDSLGGNSKTIMIATISPADVNYGETLSTLRYANRAKNIINKPTINEDANVKLIRELRAEIARLKTLLAQGNQIALLDSPTYTDIEMNRLGKGAPGSAGSAAGSGMASNDYTQQATQSYGAYPTQPGQGYSQQSSQPYGQQSYSGYSQSTDTSGYGQSSYSSYGQSQNTGYGTQSTPQGYGSTGGYGSSQSSQSSYGQQSSYPGYGQQPAPSSTSGSYGSSSQSSSYGQPQSGSYSQQPSYGGQQQSYGQQQSYNPPQGYGQQNQYNSSSGGGGGGGGGGNYGQDQSSMSSGGGSGGGYGNQDQSGGGGSGGYGQQDRGGRGRGGSGGGGGGGGGGYNRSSGGYEPRGRGGGRGGRGGMGGSDRGGFNKFGGPRDQGSRHDSEQDNSDNNTIFVQGLGENVTIESVADYFKQIGIIKTNKKTGQPMINLYTDRETGKLKGEATVSFDDPPSAKAAIDWFDGKEFSGNPIKVSFATRRADFNRGGGNGRGGRGRGGPMGRGGYGGGGSGGGGRGGFPSGGGGGGGQQRAGDWKCPNPTCENMNFSWRNECNQCKAPKPDGPGGGPGGSHMGGNYGDDRRGGRGGAIAGAPGSAGSAAGSGACPVPLQLPPLERLTLDDKKPLNTLISATGLWMSRTGTIHKIKHHEVSRSKIYIEMACGDHLVVNNSRSSRTARALRHHKYRKTCKRCRVSDEDLNKFLTKANEDQTSVKVKVVSAPTRTKKAMPKSVARAPKPLENTEAAQAQPSGSKFSPAIPVSTQESVSVPASVSTSISSISTGATASALVKGNTNPITSMSAPVQASAPALTKSQTDRLEVLLNPKDEISLNSGKPFRELESELLSRRKKDLQQIYAEERENYLGKLEREITRFFVDRGFLEIKSPILIPLEYIERMGIDNDTELSKQIFRVDKNFCLRPMLAPNLANYLRKLDRALPDPIKIFEIGPCYRKESDGKEHLEEFTMLNFCQMGSGCTRENLESIITDFLNHLGIDFKIVGDSCMVFGDTLDVMHGDLELSSAVVGPIPLDREWGIDKPWIGAGFGLERLLKVKHDFKNIKRAARSESYYNGISTNL

SEQ ID NO: 53 - DNA, 4161 bp, Artificial Sequence
  Description of Artificial Sequence: Synthetic polynucleotide
  KIF16B-FUS-PylRS AA
  CDS (1)..(4161)
atggcatcggtcaaggtggccgtgagggtccggcccatgaatcgcagggaaaaggacttggaggccaagttcattattcagatggagaaaagcaaaacgacaatcacaaacttaaagataccagaaggaggcactggggactcaggaagagaacggaccaagaccttcacctatgacttttctttttattctgctgatacaaaaagcccagattacgtttcacaagaaatggttttcaaaaccctcggcacagatgtcgtgaagtctgcatttgaaggttataatgcttgtgtctttgcatatgggcaaactggatctggaaagtcatacactatgatgggaaattctggagattctggcttaatacctcggatctgtgaaggactcttcagtcggataaatgaaaccaccagatgggatgaagcttcttttcgaactgaagtcagctacttagaaatttataacgaacgtgtgagagatctacttcggcggaagtcatctaaaaccttcaatttgagagtccgtgagcatcccaaagaaggcccttatgttgaggatttatccaaacatttagtacagaattatggtgacgtagaagaacttatggatgcgggcaatatcaaccggaccaccgcagcgactgggatgaacgacgtcagtagcaggtctcatgccatcttcaccatcaagttcactcaggctaaatttgattctgaaatgccatgtgaaaccgtcagtaagatccacttggttgatcttgccggaagtgagcgtgcagatgccaccggagccaccggggttaggctaaaggaagggggaaatattaacaagtccctcgtgactctggggaacgtcatttctgccttagctgatttatctcaggatgctgcaaatactcttgcaaagaagaagcaagttttcgtgccttacagggattctgtgttgacttggttgttaaaagatagccttggaggaaactctaaaactatcatgattgccaccatttcacctgctgatgtcaattatggagaaaccctaagtactcttcgctatgcaaatagagccaaaaacatcatcaacaagcctaccattaatgaggatgccaacgtcaaacttatccgtgagctgcgagctgaaatagccagactgaaaacgctgcttgctcaagggaatcagattgccctcttagactcccccacatatacagatattgaaatgaacagattgggaaagggcgcccccggctccgccggctccgccgccggctccggcatggcctcaaacgattatacccaacaagcaacccaaagctatggggcctaccccacccagcccgggcagggctattcccagcagagcagtcagccctacggacagcagagttacagtggttatagccagtccacggacacttcaggatatggccagagcagctattcttcttatggccagagccagaacacaggctatggaactcagtcaactccccagggatatggctcgactggcggctatggcagtagccagagctcccaatcgtcttacgggcagcagtcctcctaccctggctatggccagcagccagctcccagcagcacctcgggaagttacggtagcagttctcagagcagcagctatgggcagccccagagtgggagctacagccagcagcctagctatggtggacagcagcaaagctatggacagcagcaaagctataatccccctcagggctatggacagcagaaccagtacaacagcagcagtggtggtggaggtggaggtggaggtggaggtaactatggccaagatcaatcctccatgagtagtggtggtggcagtggtggcggttatggcaatcaagaccagagtggtggaggtggcagcggtggctatggacagcaggaccgtggaggccgcggcaggggtggcagtggtggcggcggcggcggcggcggtggtggttacaaccgcagcagtggtggctatgaacccagaggtcgtggaggtggccgtggaggcagaggtggcatgggcggaagtgaccgtggtggcttcaataaatttggtggccctcgggaccaaggatcacgtcatgactccgaacaggataattcagacaacaacaccatctttgtgcaaggcctgggtgagaatgttacaattgagtctgtggctgattacttcaagcagattggtattattaagacaaacaagaaaacgggacagcccatgattaatttgtacacagacagggaaactggcaagctgaagggagaggcaacggtctcttttgatgacccaccttcagctaaagcagctattgactggtttgatggtaaagaattctccggaaatcctatcaaggtctcatttgctactcgccgggcagactttaatcggggtggtggcaatggtcgtggaggccgagggcgaggaggacccatgggccgtggaggctatggaggtggtggcagtggtggtggtggccgaggaggatttcccagtggaggtggtggcggtggaggacagcagcgagctggtgactggaagtgtcctaatcccacctgtgagaatatgaacttctcttggaggaatgaatgcaaccagtgtaaggcccctaaaccagatggcccaggagggggaccaggtggctctcacatggggggtaactacggggatgatcgtcgtggtggcagaggaggcggcgcccccggctccgccggctccgccgccggctccggcatggcgtgcccggtgccgctgcagctgccgccgctggaacgcctgaccctggatgacaaaaaaccgctgaataccctgatctctgctactggtctgtggatgagtcgtaccggaaccattcataaaatcaaacaccacgaggttagccgttcgaaaatctatattgagatggcgtgtggcgatcatctggttgtgaacaatagccgctcttctcgtacagcacgtgcactgcgtcaccacaaatatcgtaaaacctgtaaacgttgccgtgtgtccgatgaggatctgaacaaattcctgacaaaagccaatgaggaccaaacaagcgtgaaagtgaaagtcgttagcgctcctacccgtactaaaaaagcaatgccgaaatccgttgctcgtgcccctaaaccactggaaaacactgaagcagcacaggcacagccgtctggaagcaaattctctccggccattcctgtttctacccaggagtccgtttctgttccagcaagtgtgagcaccagcattagcagtattagcaccggtgccaccgctagcgccctggttaaaggcaataccaatccgattacaagcatgtctgccccggttcaagcatcagctccagcactgacaaaatcccaaaccgatcgtctggaggttctgctgaatccgaaagacgaaatcagcctgaattccggcaaaccgtttcgtgaactggagagcgaactgctgtcacgtcgtaaaaaagacctgcaacaaatctatgccgaagaacgtgagaactatctggggaaactggaacgtgaaatcacccgctttttcgtggatcgtggctttctggagatcaaatccccgattctgattcctctggagtatatcgagcgtatgggcatcgacaatgataccgaactgagcaaacaaattttccgtgtggataaaaacttctgtctgcgccctatgctggcaccaaatctgtataactatctgcgcaaactggaccgtgccctgcctgatcctatcaaaatcttcgagatcggcccgtgttatcgtaaagagtccgacggtaaagaacatctggaggagtttaccatgctggcctttgcccaaatgggttcaggttgtactcgtgagaacctggaaagcatcatcaccgattttctgaaccacctgggcattgacttcaaaattgtgggcgacagctgtatggtgtatggcgacaccctggatgtcatgcacggcgacctggaactgtctagtgccgttgttggaccaattccgctggaccgtgagtggggtatcgacaaaccgtggatcggagcaggattcggtctggaacgcctgctgaaagtgaaacacgacttcaaaaacatcaaacgtgccgcccgttctgaatcgtattataacgggatctctacgaacctgtaa

SEQ ID NO: 54 - protein, 1386 aa, Artificial Sequence
  Description of Artificial Sequence: Synthetic polypeptide
  KIF16B-FUS-PylRS AA
MASVKVAVRVRPMNRREKDLEAKFIIQMEKSKTTITNLKIPEGGTGDSGRERTKTFTYDFSFYSADTKSPDYVSQEMVFKTLGTDVVKSAFEGYNACVFAYGQTGSGKSYTMMGNSGDSGLIPRICEGLFSRINETTRWDEASFRTEVSYLEIYNERVRDLLRRKSSKTFNLRVREHPKEGPYVEDLSKHLVQNYGDVEELMDAGNINRTTAATGMNDVSSRSHAIFTIKFTQAKFDSEMPCETVSKIHLVDLAGSERADATGATGVRLKEGGNINKSLVTLGNVISALADLSQDAANTLAKKKQVFVPYRDSVLTWLLKDSLGGNSKTIMIATISPADVNYGETLSTLRYANRAKNIINKPTINEDANVKLIRELRAEIARLKTLLAQGNQIALLDSPTYTDIEMNRLGKGAPGSAGSAAGSGMASNDYTQQATQSYGAYPTQPGQGYSQQSSQPYGQQSYSGYSQSTDTSGYGQSSYSSYGQSQNTGYGTQSTPQGYGSTGGYGSSQSSQSSYGQQSSYPGYGQQPAPSSTSGSYGSSSQSSSYGQPQSGSYSQQPSYGGQQQSYGQQQSYNPPQGYGQQNQYNSSSGGGGGGGGGGNYGQDQSSMSSGGGSGGGYGNQDQSGGGGSGGYGQQDRGGRGRGGSGGGGGGGGGGYNRSSGGYEPRGRGGGRGGRGGMGGSDRGGFNKFGGPRDQGSRHDSEQDNSDNNTIFVQGLGENVTIESVADYFKQIGIIKTNKKTGQPMINLYTDRETGKLKGEATVSFDDPPSAKAAIDWFDGKEFSGNPIKVSFATRRADFNRGGGNGRGGRGRGGPMGRGGYGGGGSGGGGRGGFPSGGGGGGGQQRAGDWKCPNPTCENMNFSWRNECNQCKAPKPDGPGGGPGGSHMGGNYGDDRRGGRGGGAPGSAGSAAGSGMACPVPLQLPPLERLTLDDKKPLNTLISATGLWMSRTGTIHKIKHHEVSRSKIYIEMACGDHLVVNNSRSSRTARALRHHKYRKTCKRCRVSDEDLNKFLTKANEDQTSVKVKVVSAPTRTKKAMPKSVARAPKPLENTEAAQAQPSGSKFSPAIPVSTQESVSVPASVSTSISSISTGATASALVKGNTNPITSMSAPVQASAPALTKSQTDRLEVLLNPKDEISLNSGKPFRELESELLSRRKKDLQQIYAEERENYLGKLEREITRFFVDRGFLEIKSPILIPLEYIERMGIDNDTELSKQIFRVDKNFCLRPMLAPNLYNYLRKLDRALPDPIKIFEIGPCYRKESDGKEHLEEFTMLAFAQMGSGCTRENLESIITDFLNHLGIDFKIVGDSCMVYGDTLDVMHGDLELSSAVVGPIPLDREWGIDKPWIGAGFGLERLLKVKHDFKNIKRAARSESYYNGISTNL

SEQ ID NO: 55 - DNA, 4188 bp, Artificial Sequence
  Description of Artificial Sequence: Synthetic polynucleotide
  KIF16B-FUS-PylRS AAAF
  CDS (1)..(4188)
atggcatcggtcaaggtggccgtgagggtccggcccatgaatcgcagggaaaaggacttggaggccaagttcattattcagatggagaaaagcaaaacgacaatcacaaacttaaagataccagaaggaggcactggggactcaggaagagaacggaccaagaccttcacctatgacttttctttttattctgctgatacaaaaagcccagattacgtttcacaagaaatggttttcaaaaccctcggcacagatgtcgtgaagtctgcatttgaaggttataatgcttgtgtctttgcatatgggcaaactggatctggaaagtcatacactatgatgggaaattctggagattctggcttaatacctcggatctgtgaaggactcttcagtcggataaatgaaaccaccagatgggatgaagcttcttttcgaactgaagtcagctacttagaaatttataacgaacgtgtgagagatctacttcggcggaagtcatctaaaaccttcaatttgagagtccgtgagcatcccaaagaaggcccttatgttgaggatttatccaaacatttagtacagaattatggtgacgtagaagaacttatggatgcgggcaatatcaaccggaccaccgcagcgactgggatgaacgacgtcagtagcaggtctcatgccatcttcaccatcaagttcactcaggctaaatttgattctgaaatgccatgtgaaaccgtcagtaagatccacttggttgatcttgccggaagtgagcgtgcagatgccaccggagccaccggggttaggctaaaggaagggggaaatattaacaagtccctcgtgactctggggaacgtcatttctgccttagctgatttatctcaggatgctgcaaatactcttgcaaagaagaagcaagttttcgtgccttacagggattctgtgttgacttggttgttaaaagatagccttggaggaaactctaaaactatcatgattgccaccatttcacctgctgatgtcaattatggagaaaccctaagtactcttcgctatgcaaatagagccaaaaacatcatcaacaagcctaccattaatgaggatgccaacgtcaaacttatccgtgagctgcgagctgaaatagccagactgaaaacgctgcttgctcaagggaatcagattgccctcttagactcccccacatatacagatattgaaatgaacagattgggaaagggcgcccccggctccgccggctccgccgccggctccggcatggcctcaaacgattatacccaacaagcaacccaaagctatggggcctaccccacccagcccgggcagggctattcccagcagagcagtcagccctacggacagcagagttacagtggttatagccagtccacggacacttcaggatatggccagagcagctattcttcttatggccagagccagaacacaggctatggaactcagtcaactccccagggatatggctcgactggcggctatggcagtagccagagctcccaatcgtcttacgggcagcagtcctcctaccctggctatggccagcagccagctcccagcagcacctcgggaagttacggtagcagttctcagagcagcagctatgggcagccccagagtgggagctacagccagcagcctagctatggtggacagcagcaaagctatggacagcagcaaagctataatccccctcagggctatggacagcagaaccagtacaacagcagcagtggtggtggaggtggaggtggaggtggaggtaactatggccaagatcaatcctccatgagtagtggtggtggcagtggtggcggttatggcaatcaagaccagagtggtggaggtggcagcggtggctatggacagcaggaccgtggaggccgcggcaggggtggcagtggtggcggcggcggcggcggcggtggtggttacaaccgcagcagtggtggctatgaacccagaggtcgtggaggtggccgtggaggcagaggtggcatgggcggaagtgaccgtggtggcttcaataaatttggtggccctcgggaccaaggatcacgtcatgactccgaacaggataattcagacaacaacaccatctttgtgcaaggcctgggtgagaatgttacaattgagtctgtggctgattacttcaagcagattggtattattaagacaaacaagaaaacgggacagcccatgattaatttgtacacagacagggaaactggcaagctgaagggagaggcaacggtctcttttgatgacccaccttcagctaaagcagctattgactggtttgatggtaaagaattctccggaaatcctatcaaggtctcatttgctactcgccgggcagactttaatcggggtggtggcaatggtcgtggaggccgagggcgaggaggacccatgggccgtggaggctatggaggtggtggcagtggtggtggtggccgaggaggatttcccagtggaggtggtggcggtggaggacagcagcgagctggtgactggaagtgtcctaatcccacctgtgagaatatgaacttctcttggaggaatgaatgcaaccagtgtaaggcccctaaaccagatggcccaggagggggaccaggtggctctcacatggggggtaactacggggatgatcgtcgtggtggcagaggaggcgattacaaggatgacgacgataagggtaccggcgcccccggctccgccggctccgccgccggctccggcgcgtgcccggtgccgctgcagctgccgccgctggaacgcctgaccctggatgataaaaaaccgctgaataccctgatctctgctactggtctgtggatgagtcgtaccggaaccattcataaaatcaaacaccacgaggttagccgttcgaaaatctatattgagatggcgtgtggcgatcatctggttgtgaacaatagccgctcttctcgtacagcacgtgcactgcgtcaccacaaatatcgtaaaacctgtaaacgttgccgtgtgtccgatgaggatctgaacaaattcctgacaaaagccaatgaggaccaaacaagcgtgaaagtgaaagtcgttagcgctcctacccgtactaaaaaagcaatgccgaaatccgttgctcgtgcccctaaaccactggaaaacactgaagcagcacaggcacagccgtctggaagcaaattctctccggccattcctgtttctacccaggagtccgtttctgttccagcaagtgtgagcaccagcattagcagtattagcaccggtgccaccgctagcgccctggttaaaggcaataccaatccgattacaagcatgtctgccccggttcaagcatcagctccagcactgacaaaatcccaaaccgatcgtctggaggttctgctgaatccgaaagacgaaatcagcctgaattccggcaaaccgtttcgtgaactggagagcgaactgctgtcacgtcgtaaaaaagacctgcaacaaatctatgccgaagaacgtgagaactatctggggaaactggaacgtgaaatcacccgctttttcgtggatcgtggctttctggagatcaaatccccgattctgattcctctggagtatatcgagcgtatgggcatcgacaatgataccgaactgagcaaacaaattttccgtgtggataaaaacttctgtctgcgccctatgctagcaccaaatctggctaactatctgcgcaaactggaccgtgccctgcctgatcctatcaaaatcttcgagatcggcccgtgttatcgtaaagagtccgacggtaaagaacatctggaggagtttaccatgctggcctttgcccaaatgggttcaggttgtactcgtgagaacctggaaagcatcatcaccgattttctgaaccacctgggcattgacttcaaaattgtgggcgacagctgtatggtgtttggcgacaccctggatgtcatgcacggcgacctggaactgtctagtgccgttgtgggcccaatcccgctggatcgtgagtggggtatcgacaaaccttggatcggtgcgggttttggtctggagcgtctgctgaaagtaaaacacgacttcaagaacatcaaacgtgctgcacgttccgagtcctattacaatggtatttctactaacctgtaa

SEQ ID NO: 56 - protein, 1395 aa, Artificial Sequence
  Description of Artificial Sequence: Synthetic polypeptide
  KIF16B-FUS-PylRS AAAF
MASVKVAVRVRPMNRREKDLEAKFIIQMEKSKTTITNLKIPEGGTGDSGRERTKTFTYDFSFYSADTKSPDYVSQEMVFKTLGTDVVKSAFEGYNACVFAYGQTGSGKSYTMMGNSGDSGLIPRICEGLFSRINETTRWDEASFRTEVSYLEIYNERVRDLLRRKSSKTFNLRVREHPKEGPYVEDLSKHLVQNYGDVEELMDAGNINRTTAATGMNDVSSRSHAIFTIKFTQAKFDSEMPCETVSKIHLVDLAGSERADATGATGVRLKEGGNINKSLVTLGNVISALADLSQDAANTLAKKKQVFVPYRDSVLTWLLKDSLGGNSKTIMIATISPADVNYGETLSTLRYANRAKNIINKPTINEDANVKLIRELRAEIARLKTLLAQGNQIALLDSPTYTDIEMNRLGKGAPGSAGSAAGSGMASNDYTQQATQSYGAYPTQPGQGYSQQSSQPYGQQSYSGYSQSTDTSGYGQSSYSSYGQSQNTGYGTQSTPQGYGSTGGYGSSQSSQSSYGQQSSYPGYGQQPAPSSTSGSYGSSSQSSSYGQPQSGSYSQQPSYGGQQQSYGQQQSYNPPQGYGQQNQYNSSSGGGGGGGGGGNYGQDQSSMSSGGGSGGGYGNQDQSGGGGSGGYGQQDRGGRGRGGSGGGGGGGGGGYNRSSGGYEPRGRGGGRGGRGGMGGSDRGGFNKFGGPRDQGSRHDSEQDNSDNNTIFVQGLGENVTIESVADYFKQIGIIKTNKKTGQPMINLYTDRETGKLKGEATVSFDDPPSAKAAIDWFDGKEFSGNPIKVSFATRRADFNRGGGNGRGGRGRGGPMGRGGYGGGGSGGGGRGGFPSGGGGGGGQQRAGDWKCPNPTCENMNFSWRNECNQCKAPKPDGPGGGPGGSHMGGNYGDDRRGGRGGDYKDDDDKGTGAPGSAGSAAGSGACPVPLQLPPLERLTLDDKKPLNTLISATGLWMSRTGTIHKIKHHEVSRSKIYIEMACGDHLVVNNSRSSRTARALRHHKYRKTCKRCRVSDEDLNKFLTKANEDQTSVKVKVVSAPTRTKKAMPKSVARAPKPLENTEAAQAQPSGSKFSPAIPVSTQESVSVPASVSTSISSISTGATASALVKGNTNPITSMSAPVQASAPALTKSQTDRLEVLLNPKDEISLNSGKPFRELESELLSRRKKDLQQIYAEERENYLGKLEREITRFFVDRGFLEIKSPILIPLEYIERMGIDNDTELSKQIFRVDKNFCLRPMLAPNLANYLRKLDRALPDPIKIFEIGPCYRKESDGKEHLEEFTMLAFAQMGSGCTRENLESIITDFLNHLGIDFKIVGDSCMVFGDTLDVMHGDLELSSAVVGPIPLDREWGIDKPWIGAGFGLERLLKVKHDFKNIKRAARSESYYNGISTNL

SEQ ID NO: 57 - DNA, 3534 bp, Artificial Sequence
  Description of Artificial Sequence: Synthetic polynucleotide
  KIF16B-EWSR1-MCP
  CDS (1)..(3534)
atggcatcggtcaaggtggccgtgagggtccggcccatgaatcgcagggaaaaggacttggaggccaagttcattattcagatggagaaaagcaaaacgacaatcacaaacttaaagataccagaaggaggcactggggactcaggaagagaacggaccaagaccttcacctatgacttttctttttattctgctgatacaaaaagcccagattacgtttcacaagaaatggttttcaaaaccctcggcacagatgtcgtgaagtctgcatttgaaggttataatgcttgtgtctttgcatatgggcaaactggatctggaaagtcatacactatgatgggaaattctggagattctggcttaatacctcggatctgtgaaggactcttcagtcggataaatgaaaccaccagatgggatgaagcttcttttcgaactgaagtcagctacttagaaatttataacgaacgtgtgagagatctacttcggcggaagtcatctaaaaccttcaatttgagagtccgtgagcatcccaaagaaggcccttatgttgaggatttatccaaacatttagtacagaattatggtgacgtagaagaacttatggatgcgggcaatatcaaccggaccaccgcagcgactgggatgaacgacgtcagtagcaggtctcatgccatcttcaccatcaagttcactcaggctaaatttgattctgaaatgccatgtgaaaccgtcagtaagatccacttggttgatcttgccggaagtgagcgtgcagatgccaccggagccaccggggttaggctaaaggaagggggaaatattaacaagtccctcgtgactctggggaacgtcatttctgccttagctgatttatctcaggatgctgcaaatactcttgcaaagaagaagcaagttttcgtgccttacagggattctgtgttgacttggttgttaaaagatagccttggaggaaactctaaaactatcatgattgccaccatttcacctgctgatgtcaattatggagaaaccctaagtactcttcgctatgcaaatagagccaaaaacatcatcaacaagcctaccattaatgaggatgccaacgtcaaacttatccgtgagctgcgagctgaaatagccagactgaaaacgctgcttgctcaagggaatcagattgccctcttagactcccccacaatggcgtccacggattacagtacctatagccaagctgcagcgcagcagggctacagtgcttacaccgcccagcccactcaaggatatgcacagaccacccaggcatatgggcaacaaagctatggaacctatggacagcccactgatgtcagctatacccaggctcagaccactgcaacctatgggcagaccgcctatgcaacttcttatggacagcctcccactggttatactactccaactgccccccaggcatacagccagcctgtccaggggtatggcactggtgcttatgataccaccactgctacagtcaccaccacccaggcctcctatgcagctcagtctgcatatggcactcagcctgcttatccagcctatgggcagcagccagcagccactgcacctacaagaccgcaggatggaaacaagcccactgagactagtcaacctcaatctagcacagggggttacaaccagcccagcctaggatatggacagagtaactacagttatccccaggtacctgggagctaccccatgcagccagtcactgcacctccatcctaccctcctaccagctattcctctacacagccgactagttatgatcagagcagttactctcagcagaacacctatgggcaaccgagcagctatggacagcagagtagctatggtcaacaaagcagctatgggcagcagcctcccactagttacccaccccaaactggatcctacagccaagctccaagtcaatatagccaacagagcagcagctacgggcagcagagttcattccgacaggaccaccccagtagcatgggtgtttatgggcaggagtctggaggattttccggaccaggagagaaccggagcatgagtggccctgataaccggggcaggggaagagggggatttgatcgtggaggcatgagcagaggtgggcggggaggaggacgcggtggaatgggcagcgctggagagcgaggtggcttcaataagcctggtggacccatggatgaaggaccagatcttgatctaggcccacctgtagatccagatgaagactctgacaacagtgcaatttatgtacaaggattaaatgacagtgtgactctagatgatctggcagacttctttaagcagtgtggggttgttaagatgaacaagagaactgggcaacccatgatccacatctacctggacaaggaaacaggaaagcccaaaggcgatgccacagtgtcctatgaagacccacctactgccaaggctgccgtggaatggtttgatgggaaagattttcaagggagcaaacttaaagtctcccttgctcggaagaagcctccaatgaacagtatgcggggtggtctgccaccccgtgagggcagaggcatgccaccaccactccgtggaggtccaggaggcccaggaggtcctgggggacccatgggtcgcatgggaggccgtggaggagatagaggaggcttccctccaagaggaccccggggttcccgagggaacccctctggaggaggaaacgtccagcaccgagctggagactggcagtgtcccaatccgggttgtggaaaccagaacttcgcctggagaacagagtgcaaccagtgtaaggccccaaagcctgaaggcttcctcccgccaccctttccgcccccgggtggtgatcgtggcagaggtggccctggtggcatgcggggaggaagaggtggcctcatggatcgtggtggtcccggtggaatgttcagaggtggccgtggtggagacagaggtggcttccgtggtggccggggcatggaccgaggtggctttggtggaggaagacgaggtggccctggggggccccctggacctttgatggaacaggattacaaggatgacgacgataagggtaccgagcagaagctgatctcagaggaggacctgggcgcccccggctccgccggctccgccgccggctccggcgcttctaactttactcagttcgttctcgtcgacaatggcggaactggcgacgtgactgtcgccccaagcaacttcgctaacgggatcgctgaatggatcagctctaactcgcgttcacaggcttacaaagtaacctgtagcgttcgtcagagctctgcgcagaatcgcaaatacaccatcaaagtcgaggtgcctaaaggcgcctggcgttcgtacttaaatatggaactaaccattccaattttcgccacgaattccgactgcgagcttattgttaaggcaatgcaaggtctcctaaaagatggaaacccgattccctcagcaatcgcagcaaactccggcatctactaa

SEQ ID NO: 58 - protein, 1177 aa, Artificial Sequence
  Description of Artificial Sequence: Synthetic polypeptide
  KIF16B-EWSR1-MCP
MASVKVAVRVRPMNRREKDLEAKFIIQMEKSKTTITNLKIPEGGTGDSGRERTKTFTYDFSFYSADTKSPDYVSQEMVFKTLGTDVVKSAFEGYNACVFAYGQTGSGKSYTMMGNSGDSGLIPRICEGLFSRINETTRWDEASFRTEVSYLEIYNERVRDLLRRKSSKTFNLRVREHPKEGPYVEDLSKHLVQNYGDVEELMDAGNINRTTAATGMNDVSSRSHAIFTIKFTQAKFDSEMPCETVSKIHLVDLAGSERADATGATGVRLKEGGNINKSLVTLGNVISALADLSQDAANTLAKKKQVFVPYRDSVLTWLLKDSLGGNSKTIMIATISPADVNYGETLSTLRYANRAKNIINKPTINEDANVKLIRELRAEIARLKTLLAQGNQIALLDSPTMASTDYSTYSQAAAQQGYSAYTAQPTQGYAQTTQAYGQQSYGTYGQPTDVSYTQAQTTATYGQTAYATSYGQPPTGYTTPTAPQAYSQPVQGYGTGAYDTTTATVTTTQASYAAQSAYGTQPAYPAYGQQPAATAPTRPQDGNKPTETSQPQSSTGGYNQPSLGYGQSNYSYPQVPGSYPMQPVTAPPSYPPTSYSSTQPTSYDQSSYSQQNTYGQPSSYGQQSSYGQQSSYGQQPPTSYPPQTGSYSQAPSQYSQQSSSYGQQSSFRQDHPSSMGVYGQESGGFSGPGENRSMSGPDNRGRGRGGFDRGGMSRGGRGGGRGGMGSAGERGGFNKPGGPMDEGPDLDLGPPVDPDEDSDNSAIYVQGLNDSVTLDDLADFFKQCGVVKMNKRTGQPMIHIYLDKETGKPKGDATVSYEDPPTAKAAVEWFDGKDFQGSKLKVSLARKKPPMNSMRGGLPPREGRGMPPPLRGGPGGPGGPGGPMGRMGGRGGDRGGFPPRGPRGSRGNPSGGGNVQHRAGDWQCPNPGCGNQNFAWRTECNQCKAPKPEGFLPPPFPPPGGDRGRGGPGGMRGGRGGLMDRGGPGGMFRGGRGGDRGGFRGGRGMDRGGFGGGRRGGPGGPPGPLMEQDYKDDDDKGTEQKLISEEDLGAPGSAGSAAGSGASNFTQFVLVDNGGTGDVTVAPSNFANGIAEWISSNSRSQAYKVTCSVRQSSAQNRKYTIKVEVPKGAWRSYLNMELTIPIFATNSDCELIVKAMQGLLKDGNPIPSAIAANSGIY

SEQ ID NO: 59 - DNA, 4656 bp, Artificial Sequence
  Description of Artificial Sequence: Synthetic polynucleotide
  KIF16B-FUS-4x Lambda N22-PylRS AF
  CDS (1)..(4656)
atggcatcggtcaaggtggccgtgagggtccggcccatgaatcgcagggaaaaggacttggaggccaagttcattattcagatggagaaaagcaaaacgacaatcacaaacttaaagataccagaaggaggcactggggactcaggaagagaacggaccaagaccttcacctatgacttttctttttattctgctgatacaaaaagcccagattacgtttcacaagaaatggttttcaaaaccctcggcacagatgtcgtgaagtctgcatttgaaggttataatgcttgtgtctttgcatatgggcaaactggatctggaaagtcatacactatgatgggaaattctggagattctggcttaatacctcggatctgtgaaggactcttcagtcggataaatgaaaccaccagatgggatgaagcttcttttcgaactgaagtcagctacttagaaatttataacgaacgtgtgagagatctacttcggcggaagtcatctaaaaccttcaatttgagagtccgtgagcatcccaaagaaggcccttatgttgaggatttatccaaacatttagtacagaattatggtgacgtagaagaacttatggatgcgggcaatatcaaccggaccaccgcagcgactgggatgaacgacgtcagtagcaggtctcatgccatcttcaccatcaagttcactcaggctaaatttgattctgaaatgccatgtgaaaccgtcagtaagatccacttggttgatcttgccggaagtgagcgtgcagatgccaccggagccaccggggttaggctaaaggaagggggaaatattaacaagtccctcgtgactctggggaacgtcatttctgccttagctgatttatctcaggatgctgcaaatactcttgcaaagaagaagcaagttttcgtgccttacagggattctgtgttgacttggttgttaaaagatagccttggaggaaactctaaaactatcatgattgccaccatttcacctgctgatgtcaattatggagaaaccctaagtactcttcgctatgcaaatagagccaaaaacatcatcaacaagcctaccattaatgaggatgccaacgtcaaacttatccgtgagctgcgagctgaaatagccagactgaaaacgctgcttgctcaagggaatcagattgccctcttagactcccccacatatacagatattgaaatgaacagattgggaaagggcgcccccggctccgccggctccgccgccggctccggcatggcctcaaacgattatacccaacaagcaacccaaagctatggggcctaccccacccagcccgggcagggctattcccagcagagcagtcagccctacggacagcagagttacagtggttatagccagtccacggacacttcaggatatggccagagcagctattcttcttatggccagagccagaacacaggctatggaactcagtcaactccccagggatatggctcgactggcggctatggcagtagccagagctcccaatcgtcttacgggcagcagtcctcctaccctggctatggccagcagccagctcccagcagcacctcgggaagttacggtagcagttctcagagcagcagctatgggcagccccagagtgggagctacagccagcagcctagctatggtggacagcagcaaagctatggacagcagcaaagctataatccccctcagggctatggacagcagaaccagtacaacagcagcagtggtggtggaggtggaggtggaggtggaggtaactatggccaagatcaatcctccatgagtagtggtggtggcagtggtggcggttatggcaatcaagaccagagtggtggaggtggcagcggtggctatggacagcaggaccgtggaggccgcggcaggggtggcagtggtggcggcggcggcggcggcggtggtggttacaaccgcagcagtggtggctatgaacccagaggtcgtggaggtggccgtggaggcagaggtggcatgggcggaagtgaccgtggtggcttcaataaatttggtggccctcgggaccaaggatcacgtcatgactccgaacaggataattcagacaacaacaccatctttgtgcaaggcctgggtgagaatgttacaattgagtctgtggctgattacttcaagcagattggtattattaagacaaacaagaaaacgggacagcccatgattaatttgtacacagacagggaaactggcaagctgaagggagaggcaacggtctcttttgatgacccaccttcagctaaagcagctattgactggtttgatggtaaagaattctccggaaatcctatcaaggtctcatttgctactcgccgggcagactttaatcggggtggtggcaatggtcgtggaggccgagggcgaggaggacccatgggccgtggaggctatggaggtggtggcagtggtggtggtggccgaggaggatttcccagtggaggtggtggcggtggaggacagcagcgagctggtgactggaagtgtcctaatcccacctgtgagaatatgaacttctcttggaggaatgaatgcaaccagtgtaaggcccctaaaccagatggcccaggagggggaccaggtggctctcacatggggggtaactacggggatgatcgtcgtggtggcagaggaggcgccaccatggacgcacaaacacgacgacgtgagcgtcgcgctgagaaacaagctcaatggaaagctgcaaacccaccgctcgacggagccggagctggcgctggagctggagccggagctggcggtctagccaccatggacgcacaaacacgacgacgtgagcgtcgcgctgagaaacaagctcaatggaaagctgcaaacccaccgctcgacggagccggagctggcgctggagctggagccggagctggcggtctagccaccatggacgcacaaacacgacgacgtgagcgtcgcgctgagaaacaagctcaatggaaagctgcaaacccaccgctcgacggagccggagctggcgctggagctggagccggagctggcggtctagccaccatggacgcacaaacacgacgacgtgagcgtcgcgctgagaaacaagctcaatggaaagctgcaaacccaccgctcgattacaaggatgacgacgataagggtaccggcgcccccggctccgccggctccgccgccggctccggcgcgtgcccggtgccgctgcagctgccgccgctggaacgcctgaccctggatgataaaaaaccgctgaataccctgatctctgctactggtctgtggatgagtcgtaccggaaccattcataaaatcaaacaccacgaggttagccgttcgaaaatctatattgagatggcgtgtggcgatcatctggttgtgaacaatagccgctcttctcgtacagcacgtgcactgcgtcaccacaaatatcgtaaaacctgtaaacgttgccgtgtgtccgatgaggatctgaacaaattcctgacaaaagccaatgaggaccaaacaagcgtgaaagtgaaagtcgttagcgctcctacccgtactaaaaaagcaatgccgaaatccgttgctcgtgcccctaaaccactggaaaacactgaagcagcacaggcacagccgtctggaagcaaattctctccggccattcctgtttctacccaggagtccgtttctgttccagcaagtgtgagcaccagcattagcagtattagcaccggtgccaccgctagcgccctggttaaaggcaataccaatccgattacaagcatgtctgccccggttcaagcatcagctccagcactgacaaaatcccaaaccgatcgtctggaggttctgctgaatccgaaagacgaaatcagcctgaattccggcaaaccgtttcgtgaactggagagcgaactgctgtcacgtcgtaaaaaagacctgcaacaaatctatgccgaagaacgtgagaactatctggggaaactggaacgtgaaatcacccgctttttcgtggatcgtggctttctggagatcaaatccccgattctgattcctctggagtatatcgagcgtatgggcatcgacaatgataccgaactgagcaaacaaattttccgtgtggataaaaacttctgtctgcgccctatgctagcaccaaatctggctaactatctgcgcaaactggaccgtgccctgcctgatcctatcaaaatcttcgagatcggcccgtgttatcgtaaagagtccgacggtaaagaacatctggaggagtttaccatgctgaacttttgccaaatgggttcaggttgtactcgtgagaacctggaaagcatcatcaccgattttctgaaccacctgggcattgacttcaaaattgtgggcgacagctgtatggtgtttggcgacaccctggatgtcatgcacggcgacctggaactgtctagtgccgttgtgggcccaatcccgctggatcgtgagtggggtatcgacaaaccttggatcggtgcgggttttggtctggagcgtctgctgaaagtaaaacacgacttcaagaacatcaaacgtgctgcacgttccgagtcctattacaatggtatttctactaacctgtaa

SEQ ID NO: 60 - protein, 1551 aa, Artificial Sequence
  Description of Artificial Sequence: Synthetic polypeptide
  KIF16B-FUS-4x Lambda N22-PylRS AF
MASVKVAVRVRPMNRREKDLEAKFIIQMEKSKTTITNLKIPEGGTGDSGRERTKTFTYDFSFYSADTKSPDYVSQEMVFKTLGTDVVKSAFEGYNACVFAYGQTGSGKSYTMMGNSGDSGLIPRICEGLFSRINETTRWDEASFRTEVSYLEIYNERVRDLLRRKSSKTFNLRVREHPKEGPYVEDLSKHLVQNYGDVEELMDAGNINRTTAATGMNDVSSRSHAIFTIKFTQAKFDSEMPCETVSKIHLVDLAGSERADATGATGVRLKEGGNINKSLVTLGNVISALADLSQDAANTLAKKKQVFVPYRDSVLTWLLKDSLGGNSKTIMIATISPADVNYGETLSTLRYANRAKNIINKPTINEDANVKLIRELRAEIARLKTLLAQGNQIALLDSPTYTDIEMNRLGKGAPGSAGSAAGSGMASNDYTQQATQSYGAYPTQPGQGYSQQSSQPYGQQSYSGYSQSTDTSGYGQSSYSSYGQSQNTGYGTQSTPQGYGSTGGYGSSQSSQSSYGQQSSYPGYGQQPAPSSTSGSYGSSSQSSSYGQPQSGSYSQQPSYGGQQQSYGQQQSYNPPQGYGQQNQYNSSSGGGGGGGGGGNYGQDQSSMSSGGGSGGGYGNQDQSGGGGSGGYGQQDRGGRGRGGSGGGGGGGGGGYNRSSGGYEPRGRGGGRGGRGGMGGSDRGGFNKFGGPRDQGSRHDSEQDNSDNNTIFVQGLGENVTIESVADYFKQIGIIKTNKKTGQPMINLYTDRETGKLKGEATVSFDDPPSAKAAIDWFDGKEFSGNPIKVSFATRRADFNRGGGNGRGGRGRGGPMGRGGYGGGGSGGGGRGGFPSGGGGGGGQQRAGDWKCPNPTCENMNFSWRNECNQCKAPKPDGPGGGPGGSHMGGNYGDDRRGGRGGATMDAQTRRRERRAEKQAQWKAANPPLDGAGAGAGAGAGAGGLATMDAQTRRRERRAEKQAQWKAANPPLDGAGAGAGAGAGAGGLATMDAQTRRRERRAEKQAQWKAANPPLDGAGAGAGAGAGAGGLATMDAQTRRRERRAEKQAQWKAANPPLDYKDDDDKGTGAPGSAGSAAGSGACPVPLQLPPLERLTLDDKKPLNTLISATGLWMSRTGTIHKIKHHEVSRSKIYIEMACGDHLVVNNSRSSRTARALRHHKYRKTCKRCRVSDEDLNKFLTKANEDQTSVKVKVVSAPTRTKKAMPKSVARAPKPLENTEAAQAQPSGSKFSPAIPVSTQESVSVPASVSTSISSISTGATASALVKGNTNPITSMSAPVQASAPALTKSQTDRLEVLLNPKDEISLNSGKPFRELESELLSRRKKDLQQIYAEERENYLGKLEREITRFFVDRGFLEIKSPILIPLEYIERMGIDNDTELSKQIFRVDKNFCLRPMLAPNLANYLRKLDRALPDPIKIFEIGPCYRKESDGKEHLEEFTMLNFCQMGSGCTRENLESIITDFLNHLGIDFKIVGDSCMVFGDTLDVMHGDLELSSAVVGPIPLDREWGIDKPWIGAGFGLERLLKVKHDFKNIKRAARSESYYNGISTNL

SEQ ID NO: 61 - DNA, 4581 bp, Artificial Sequence
  Description of Artificial Sequence: Synthetic polynucleotide
  KIF16B-FUS-MCP-PylRS AF
  CDS (1)..(4581)
atggcatcggtcaaggtggccgtgagggtccggcccatgaatcgcagggaaaaggacttggaggccaagttcattattcagatggagaaaagcaaaacgacaatcacaaacttaaagataccagaaggaggcactggggactcaggaagagaacggaccaagaccttcacctatgacttttctttttattctgctgatacaaaaagcccagattacgtttcacaagaaatggttttcaaaaccctcggcacagatgtcgtgaagtctgcatttgaaggttataatgcttgtgtctttgcatatgggcaaactggatctggaaagtcatacactatgatgggaaattctggagattctggcttaatacctcggatctgtgaaggactcttcagtcggataaatgaaaccaccagatgggatgaagcttcttttcgaactgaagtcagctacttagaaatttataacgaacgtgtgagagatctacttcggcggaagtcatctaaaaccttcaatttgagagtccgtgagcatcccaaagaaggcccttatgttgaggatttatccaaacatttagtacagaattatggtgacgtagaagaacttatggatgcgggcaatatcaaccggaccaccgcagcgactgggatgaacgacgtcagtagcaggtctcatgccatcttcaccatcaagttcactcaggctaaatttgattctgaaatgccatgtgaaaccgtcagtaagatccacttggttgatcttgccggaagtgagcgtgcagatgccaccggagccaccggggttaggctaaaggaagggggaaatattaacaagtccctcgtgactctggggaacgtcatttctgccttagctgatttatctcaggatgctgcaaatactcttgcaaagaagaagcaagttttcgtgccttacagggattctgtgttgacttggttgttaaaagatagccttggaggaaactctaaaactatcatgattgccaccatttcacctgctgatgtcaattatggagaaaccctaagtactcttcgctatgcaaatagagccaaaaacatcatcaacaagcctaccattaatgaggatgccaacgtcaaacttatccgtgagctgcgagctgaaatagccagactgaaaacgctgcttgctcaagggaatcagattgccctcttagactcccccacatatacagatattgaaatgaacagattgggaaagggcgcccccggctccgccggctccgccgccggctccggcatggcctcaaacgattatacccaacaagcaacccaaagctatggggcctaccccacccagcccgggcagggctattcccagcagagcagtcagccctacggacagcagagttacagtggttatagccagtccacggacacttcaggatatggccagagcagctattcttcttatggccagagccagaacacaggctatggaactcagtcaactccccagggatatggctcgactggcggctatggcagtagccagagctcccaatcgtcttacgggcagcagtcctcctaccctggctatggccagcagccagctcccagcagcacctcgggaagttacggtagcagttctcagagcagcagctatgggcagccccagagtgggagctacagccagcagcctagctatggtggacagcagcaaagctatggacagcagcaaagctataatccccctcagggctatggacagcagaaccagtacaacagcagcagtggtggtggaggtggaggtggaggtggaggtaactatggccaagatcaatcctccatgagtagtggtggtggcagtggtggcggttatggcaatcaagaccagagtggtggaggtggcagcggtggctatggacagcaggaccgtggaggccgcggcaggggtggcagtggtggcggcggcggcggcggcggtggtggttacaaccgcagcagtggtggctatgaacccagaggtcgtggaggtggccgtggaggcagaggtggcatgggcggaagtgaccgtggtggcttcaataaatttggtggccctcgggaccaaggatcacgtcatgactccgaacaggataattcagacaacaacaccatctttgtgcaaggcctgggtgagaatgttacaattgagtctgtggctgattacttcaagcagattggtattattaagacaaacaagaaaacgggacagcccatgattaatttgtacacagacagggaaactggcaagctgaagggagaggcaacggtctcttttgatgacccaccttcagctaaagcagctattgactggtttgatggtaaagaattctccggaaatcctatcaaggtctcatttgctactcgccgggcagactttaatcggggtggtggcaatggtcgtggaggccgagggcgaggaggacccatgggccgtggaggctatggaggtggtggcagtggtggtggtggccgaggaggatttcccagtggaggtggtggcggtggaggacagcagcgagctggtgactggaagtgtcctaatcccacctgtgagaatatgaacttctcttggaggaatgaatgcaaccagtgtaaggcccctaaaccagatggcccaggagggggaccaggtggctctcacatggggggtaactacggggatgatcgtcgtggtggcagaggaggcgattacaaggatgacgacgataagggtaccggcgcccccggctccgccggctccgccgccggctccggcgcttctaactttactcagttcgttctcgtcgacaatggcggaactggcgacgtgactgtcgccccaagcaacttcgctaacgggatcgctgaatggatcagctctaactcgcgttcacaggcttacaaagtaacctgtagcgttcgtcagagctctgcgcagaatcgcaaatacaccatcaaagtcgaggtgcctaaaggcgcctggcgttcgtacttaaatatggaactaaccattccaattttcgccacgaattccgactgcgagcttattgttaaggcaatgcaaggtctcctaaaagatggaaacccgattccctcagcaatcgcagcaaactccggcatctacggtaccggcgcccccggctccgccggctccgccgccggctccggcgcgtgcccggtgccgctgcagctgccgccgctggaacgcctgaccctggatgataaaaaaccgctgaataccctgatctctgctactggtctgtggatgagtcgtaccggaaccattcataaaatcaaacaccacgaggttagccgttcgaaaatctatattgagatggcgtgtggcgatcatctggttgtgaacaatagccgctcttctcgtacagcacgtgcactgcgtcaccacaaatatcgtaaaacctgtaaacgttgccgtgtgtccgatgaggatctgaacaaattcctgacaaaagccaatgaggaccaaacaagcgtgaaagtgaaagtcgttagcgctcctacccgtactaaaaaagcaatgccgaaatccgttgctcgtgcccctaaaccactggaaaacactgaagcagcacaggcacagccgtctggaagcaaattctctccggccattcctgtttctacccaggagtccgtttctgttccagcaagtgtgagcaccagcattagcagtattagcaccggtgccaccgctagcgccctggttaaaggcaataccaatccgattacaagcatgtctgccccggttcaagcatcagctccagcactgacaaaatcccaaaccgatcgtctggaggttctgctgaatccgaaagacgaaatcagcctgaattccggcaaaccgtttcgtgaactggagagcgaactgctgtcacgtcgtaaaaaagacctgcaacaaatctatgccgaagaacgtgagaactatctggggaaactggaacgtgaaatcacccgctttttcgtggatcgtggctttctggagatcaaatccccgattctgattcctctggagtatatcgagcgtatgggcatcgacaatgataccgaactgagcaaacaaattttccgtgtggataaaaacttctgtctgcgccctatgctagcaccaaatctggctaactatctgcgcaaactggaccgtgccctgcctgatcctatcaaaatcttcgagatcggcccgtgttatcgtaaagagtccgacggtaaagaacatctggaggagtttaccatgctgaacttttgccaaatgggttcaggttgtactcgtgagaacctggaaagcatcatcaccgattttctgaaccacctgggcattgacttcaaaattgtgggcgacagctgtatggtgtttggcgacaccctggatgtcatgcacggcgacctggaactgtctagtgccgttgtgggcccaatcccgctggatcgtgagtggggtatcgacaaaccttggatcggtgcgggttttggtctggagcgtctgctgaaagtaaaacacgacttcaagaacatcaaacgtgctgcacgttccgagtcctattacaatggtatttctactaacctgtaa

SEQ ID NO: 62 - protein, 1526 aa, Artificial Sequence
  Description of Artificial Sequence: Synthetic polypeptide
  KIF16B-FUS-MCP-PylRS AF
MASVKVAVRVRPMNRREKDLEAKFIIQMEKSKTTITNLKIPEGGTGDSGRERTKTFTYDFSFYSADTKSPDYVSQEMVFKTLGTDVVKSAFEGYNACVFAYGQTGSGKSYTMMGNSGDSGLIPRICEGLFSRINETTRWDEASFRTEVSYLEIYNERVRDLLRRKSSKTFNLRVREHPKEGPYVEDLSKHLVQNYGDVEELMDAGNINRTTAATGMNDVSSRSHAIFTIKFTQAKFDSEMPCETVSKIHLVDLAGSERADATGATGVRLKEGGNINKSLVTLGNVISALADLSQDAANTLAKKKQVFVPYRDSVLTWLLKDSLGGNSKTIMIATISPADVNYGETLSTLRYANRAKNIINKPTINEDANVKLIRELRAEIARLKTLLAQGNQIALLDSPTYTDIEMNRLGKGAPGSAGSAAGSGMASNDYTQQATQSYGAYPTQPGQGYSQQSSQPYGQQSYSGYSQSTDTSGYGQSSYSSYGQSQNTGYGTQSTPQGYGSTGGYGSSQSSQSSYGQQSSYPGYGQQPAPSSTSGSYGSSSQSSSYGQPQSGSYSQQPSYGGQQQSYGQQQSYNPPQGYGQQNQYNSSSGGGGGGGGGGNYGQDQSSMSSGGGSGGGYGNQDQSGGGGSGGYGQQDRGGRGRGGSGGGGGGGGGGYNRSSGGYEPRGRGGGRGGRGGMGGSDRGGFNKFGGPRDQGSRHDSEQDNSDNNTIFVQGLGENVTIESVADYFKQIGIIKTNKKTGQPMINLYTDRETGKLKGEATVSFDDPPSAKAAIDWFDGKEFSGNPIKVSFATRRADFNRGGGNGRGGRGRGGPMGRGGYGGGGSGGGGRGGFPSGGGGGGGQQRAGDWKCPNPTCENMNFSWRNECNQCKAPKPDGPGGGPGGSHMGGNYGDDRRGGRGGDYKDDDDKGTGAPGSAGSAAGSGASNFTQFVLVDNGGTGDVTVAPSNFANGIAEWISSNSRSQAYKVTCSVRQSSAQNRKYTIKVEVPKGAWRSYLNMELTIPIFATNSDCELIVKAMQGLLKDGNPIPSAIAANSGIYGTGAPGSAGSAAGSGACPVPLQLPPLERLTLDDKKPLNTLISATGLWMSRTGTIHKIKHHEVSRSKIYIEMACGDHLVVNNSRSSRTARALRHHKYRKTCKRCRVSDEDLNKFLTKANEDQTSVKVKVVSAPTRTKKAMPKSVARAPKPLENTEAAQAQPSGSKFSPAIPVSTQESVSVPASVSTSISSISTGATASALVKGNTNPITSMSAPVQASAPALTKSQTDRLEVLLNPKDEISLNSGKPFRELESELLSRRKKDLQQIYAEERENYLGKLEREITRFFVDRGFLEIKSPILIPLEYIERMGIDNDTELSKQIFRVDKNFCLRPMLAPNLANYLRKLDRALPDPIKIFEIGPCYRKESDGKEHLEEFTMLNFCQMGSGCTRENLESIITDFLNHLGIDFKIVGDSCMVFGDTLDVMHGDLELSSAVVGPIPLDREWGIDKPWIGAGFGLERLLKVKHDFKNIKRAARSESYYNGISTNL

SEQ ID NO: 63 - DNA, 2697 bp, Artificial Sequence
  Description of Artificial Sequence: Synthetic polynucleotide
  KIF16B-PylRS AF
  CDS (1)..(2697)
atggcatcggtcaaggtggccgtgagggtccggcccatgaatcgcagggaaaaggacttggaggccaagttcattattcagatggagaaaagcaaaacgacaatcacaaacttaaagataccagaaggaggcactggggactcaggaagagaacggaccaagaccttcacctatgacttttctttttattctgctgatacaaaaagcccagattacgtttcacaagaaatggttttcaaaaccctcggcacagatgtcgtgaagtctgcatttgaaggttataatgcttgtgtctttgcatatgggcaaactggatctggaaagtcatacactatgatgggaaattctggagattctggcttaatacctcggatctgtgaaggactcttcagtcggataaatgaaaccaccagatgggatgaagcttcttttcgaactgaagtcagctacttagaaatttataacgaacgtgtgagagatctacttcggcggaagtcatctaaaaccttcaatttgagagtccgtgagcatcccaaagaaggcccttatgttgaggatttatccaaacatttagtacagaattatggtgacgtagaagaacttatggatgcgggcaatatcaaccggaccaccgcagcgactgggatgaacgacgtcagtagcaggtctcatgccatcttcaccatcaagttcactcaggctaaatttgattctgaaatgccatgtgaaaccgtcagtaagatccacttggttgatcttgccggaagtgagcgtgcagatgccaccggagccaccggggttaggctaaaggaagggggaaatattaacaagtccctcgtgactctggggaacgtcatttctgccttagctgatttatctcaggatgctgcaaatactcttgcaaagaagaagcaagttttcgtgccttacagggattctgtgttgacttggttgttaaaagatagccttggaggaaactctaaaactatcatgattgccaccatttcacctgctgatgtcaattatggagaaaccctaagtactcttcgctatgcaaatagagccaaaaacatcatcaacaagcctaccattaatgaggatgccaacgtcaaacttatccgtgagctgcgagctgaaatagccagactgaaaacgctgcttgctcaagggaatcagattgccctcttagactcccccacatatacagatattgaaatgaacagattgggaaagggcgcccccggctccgccggctccgccggctccgccgccggctccggcatggcgtgcccggtgccgctgcagctgccgccgctggaacgcctgaccctggatgataaaaaaccgctgaataccctgatctctgctactggtctgtggatgagtcgtaccggaaccattcataaaatcaaacaccacgaggttagccgttcgaaaatctatattgagatggcgtgtggcgatcatctggttgtgaacaatagccgctcttctcgtacagcacgtgcactgcgtcaccacaaatatcgtaaaacctgtaaacgttgccgtgtgtccgatgaggatctgaacaaattcctgacaaaagccaatgaggaccaaacaagcgtgaaagtgaaagtcgttagcgctcctacccgtactaaaaaagcaatgccgaaatccgttgctcgtgcccctaaaccactggaaaacactgaagcagcacaggcacagccgtctggaagcaaattctctccggccattcctgtttctacccaggagtccgtttctgttccagcaagtgtgagcaccagcattagcagtattagcaccggtgccaccgctagcgccctggttaaaggcaataccaatccgattacaagcatgtctgccccggttcaagcatcagctccagcactgacaaaatcccaaaccgatcgtctggaggttctgctgaatccgaaagacgaaatcagcctgaattccggcaaaccgtttcgtgaactggagagcgaactgctgtcacgtcgtaaaaaagacctgcaacaaatctatgccgaagaacgtgagaactatctggggaaactggaacgtgaaatcacccgctttttcgtggatcgtggctttctggagatcaaatccccgattctgattcctctggagtatatcgagcgtatgggcatcgacaatgataccgaactgagcaaacaaattttccgtgtggataaaaacttctgtctgcgccctatgctagcaccaaatctggctaactatctgcgcaaactggaccgtgccctgcctgatcctatcaaaatcttcgagatcggcccgtgttatcgtaaagagtccgacggtaaagaacatctggaggagtttaccatgctgaacttttgccaaatgggttcaggttgtactcgtgagaacctggaaagcatcatcaccgattttctgaaccacctgggcattgacttcaaaattgtgggcgacagctgtatggtgtttggcgacaccctggatgtcatgcacggcgacctggaactgtctagtgccgttgtgggcccaatcccgctggatcgtgagtggggtatcgacaaaccttggatcggtgcgggttttggtctggagcgtctgctgaaagtaaaacacgacttcaagaacatcaaacgtgctgcacgttccgagtcctattacaatggtatttctactaacctgtaa

SEQ ID NO: 64 - protein, 898 aa, Artificial Sequence
  Description of Artificial Sequence: Synthetic polypeptide
  KIF16B-PylRS AF
MASVKVAVRVRPMNRREKDLEAKFIIQMEKSKTTITNLKIPEGGTGDSGRERTKTFTYDFSFYSADTKSPDYVSQEMVFKTLGTDVVKSAFEGYNACVFAYGQTGSGKSYTMMGNSGDSGLIPRICEGLFSRINETTRWDEASFRTEVSYLEIYNERVRDLLRRKSSKTFNLRVREHPKEGPYVEDLSKHLVQNYGDVEELMDAGNINRTTAATGMNDVSSRSHAIFTIKFTQAKFDSEMPCETVSKIHLVDLAGSERADATGATGVRLKEGGNINKSLVTLGNVISALADLSQDAANTLAKKKQVFVPYRDSVLTWLLKDSLGGNSKTIMIATISPADVNYGETLSTLRYANRAKNIINKPTINEDANVKLIRELRAEIARLKTLLAQGNQIALLDSPTYTDIEMNRLGKGAPGSAGSAGSAAGSGMACPVPLQLPPLERLTLDDKKPLNTLISATGLWMSRTGTIHKIKHHEVSRSKIYIEMACGDHLVVNNSRSSRTARALRHHKYRKTCKRCRVSDEDLNKFLTKANEDQTSVKVKVVSAPTRTKKAMPKSVARAPKPLENTEAAQAQPSGSKFSPAIPVSTQESVSVPASVSTSISSISTGATASALVKGNTNPITSMSAPVQASAPALTKSQTDRLEVLLNPKDEISLNSGKPFRELESELLSRRKKDLQQIYAEERENYLGKLEREITRFFVDRGFLEIKSPILIPLEYIERMGIDNDTELSKQIFRVDKNFCLRPMLAPNLANYLRKLDRALPDPIKIFEIGPCYRKESDGKEHLEEFTMLNFCQMGSGCTRENLESIITDFLNHLGIDFKIVGDSCMVFGDTLDVMHGDLELSSAVVGPIPLDREWGIDKPWIGAGFGLERLLKVKHDFKNIKRAARSESYYNGISTNL

SEQ ID NO: 65 - DNA, 1626 bp, Artificial Sequence
  Description of Artificial Sequence: Synthetic polynucleotide
  KIF16B-MCP
  CDS (1)..(1626)
atggcatcggtcaaggtggccgtgagggtccggcccatgaatcgcagggaaaaggacttggaggccaagttcattattcagatggagaaaagcaaaacgacaatcacaaacttaaagataccagaaggaggcactggggactcaggaagagaacggaccaagaccttcacctatgacttttctttttattctgctgatacaaaaagcccagattacgtttcacaagaaatggttttcaaaaccctcggcacagatgtcgtgaagtctgcatttgaaggttataatgcttgtgtctttgcatatgggcaaactggatctggaaagtcatacactatgatgggaaattctggagattctggcttaatacctcggatctgtgaaggactcttcagtcggataaatgaaaccaccagatgggatgaagcttcttttcgaactgaagtcagctacttagaaatttataacgaacgtgtgagagatctacttcggcggaagtcatctaaaaccttcaatttgagagtccgtgagcatcccaaagaaggcccttatgttgaggatttatccaaacatttagtacagaattatggtgacgtagaagaacttatggatgcgggcaatatcaaccggaccaccgcagcgactgggatgaacgacgtcagtagcaggtctcatgccatcttcaccatcaagttcactcaggctaaatttgattctgaaatgccatgtgaaaccgtcagtaagatccacttggttgatcttgccggaagtgagcgtgcagatgccaccggagccaccggggttaggctaaaggaagggggaaatattaacaagtccctcgtgactctggggaacgtcatttctgccttagctgatttatctcaggatgctgcaaatactcttgcaaagaagaagcaagttttcgtgccttacagggattctgtgttgacttggttgttaaaagatagccttggaggaaactctaaaactatcatgattgccaccatttcacctgctgatgtcaattatggagaaaccctaagtactcttcgctatgcaaatagagccaaaaacatcatcaacaagcctaccattaatgaggatgccaacgtcaaacttatccgtgagctgcgagctgaaatagccagactgaaaacgctgcttgctcaagggaatcagattgccctcttagactcccccacatatacagatattgaaatgaacagattgggaaagggcgcccccggctccgccggctccgccgccggctccggcatggcttctaactttactcagttcgttctcgtcgacaatggcggaactggcgacgtgactgtcgccccaagcaacttcgctaacgggatcgctgaatggatcagctctaactcgcgttcacaggcttacaaagtaacctgtagcgttcgtcagagctctgcgcagaatcgcaaatacaccatcaaagtcgaggtgcctaaaggcgcctggcgttcgtacttaaatatggaactaaccattccaattttcgccacgaattccgactgcgagcttattgttaaggcaatgcaaggtctcctaaaagatggaaacccgattccctcagcaatcgcagcaaactccggcatctactaa

SEQ ID NO: 66 - protein, 541 aa, Artificial Sequence
  Description of Artificial Sequence: Synthetic polypeptide
  KIF16B-MCP
MASVKVAVRVRPMNRREKDLEAKFIIQMEKSKTTITNLKIPEGGTGDSGRERTKTFTYDFSFYSADTKSPDYVSQEMVFKTLGTDVVKSAFEGYNACVFAYGQTGSGKSYTMMGNSGDSGLIPRICEGLFSRINETTRWDEASFRTEVSYLEIYNERVRDLLRRKSSKTFNLRVREHPKEGPYVEDLSKHLVQNYGDVEELMDAGNINRTTAATGMNDVSSRSHAIFTIKFTQAKFDSEMPCETVSKIHLVDLAGSERADATGATGVRLKEGGNINKSLVTLGNVISALADLSQDAANTLAKKKQVFVPYRDSVLTWLLKDSLGGNSKTIMIATISPADVNYGETLSTLRYANRAKNIINKPTINEDANVKLIRELRAEIARLKTLLAQGNQIALLDSPTYTDIEMNRLGKGAPGSAGSAAGSGMASNFTQFVLVDNGGTGDVTVAPSNFANGIAEWISSNSRSQAYKVTCSVRQSSAQNRKYTIKVEVPKGAWRSYLNMELTIPIFATNSDCELIVKAMQGLLKDGNPIPSAIAANSGIY

SEQ ID NO: 67 - DNA, 3081 bp, Artificial Sequence
  Description of Artificial Sequence: Synthetic polynucleotide
  KIF16B-MCP-PylRS AF
  CDS (1)..(3081)
atggcatcggtcaaggtggccgtgagggtccggcccatgaatcgcagggaaaaggacttggaggccaagttcattattcagatggagaaaagcaaaacgacaatcacaaacttaaagataccagaaggaggcactggggactcaggaagagaacggaccaagaccttcacctatgacttttctttttattctgctgatacaaaaagcccagattacgtttcacaagaaatggttttcaaaaccctcggcacagatgtcgtgaagtctgcatttgaaggttataatgcttgtgtctttgcatatgggcaaactggatctggaaagtcatacactatgatgggaaattctggagattctggcttaatacctcggatctgtgaaggactcttcagtcggataaatgaaaccaccagatgggatgaagcttcttttcgaactgaagtcagctacttagaaatttataacgaacgtgtgagagatctacttcggcggaagtcatctaaaaccttcaatttgagagtccgtgagcatcccaaagaaggcccttatgttgaggatttatccaaacatttagtacagaattatggtgacgtagaagaacttatggatgcgggcaatatcaaccggaccaccgcagcgactgggatgaacgacgtcagtagcaggtctcatgccatcttcaccatcaagttcactcaggctaaatttgattctgaaatgccatgtgaaaccgtcagtaagatccacttggttgatcttgccggaagtgagcgtgcagatgccaccggagccaccggggttaggctaaaggaagggggaaatattaacaagtccctcgtgactctggggaacgtcatttctgccttagctgatttatctcaggatgctgcaaatactcttgcaaagaagaagcaagttttcgtgccttacagggattctgtgttgacttggttgttaaaagatagccttggaggaaactctaaaactatcatgattgccaccatttcacctgctgatgtcaattatggagaaaccctaagtactcttcgctatgcaaatagagccaaaaacatcatcaacaagcctaccattaatgaggatgccaacgtcaaacttatccgtgagctgcgagctgaaatagccagactgaaaacgctgcttgctcaagggaatcagattgccctcttagactcccccacatatacagatattgaaatgaacagattgggaaagggcgcccccggctccgccggctccgccgccggctccggcatggcttctaactttactcagttcgttctcgtcgacaatggcggaactggcgacgtgactgtcgccccaagcaacttcgctaacgggatcgctgaatggatcagctctaactcgcgttcacaggcttacaaagtaacctgtagcgttcgtcagagctctgcgcagaatcgcaaatacaccatcaaagtcgaggtgcctaaaggcgcctggcgttcgtacttaaatatggaactaaccattccaattttcgccacgaattccgactgcgagcttattgttaaggcaatgcaaggtctcctaaaagatggaaacccgattccctcagcaatcgcagcaaactccggcatctacggtaccggcgcccccggctccgccggctccgccgccggctccggcgcgtgcccggtgccgctgcagctgccgccgctggaacgcctgaccctggatgataaaaaaccgctgaataccctgatctctgctactggtctgtggatgagtcgtaccggaaccattcataaaatcaaacaccacgaggttagccgttcgaaaatctatattgagatggcgtgtggcgatcatctggttgtgaacaatagccgctcttctcgtacagcacgtgcactgcgtcaccacaaatatcgtaaaacctgtaaacgttgccgtgtgtccgatgaggatctgaacaaattcctgacaaaagccaatgaggaccaaacaagcgtgaaagtgaaagtcgttagcgctcctacccgtactaaaaaagcaatgccgaaatccgttgctcgtgcccctaaaccactggaaaacactgaagcagcacaggcacagccgtctggaagcaaattctctccggccattcctgtttctacccaggagtccgtttctgttccagcaagtgtgagcaccagcattagcagtattagcaccggtgccaccgctagcgccctggttaaaggcaataccaatccgattacaagcatgtctgccccggttcaagcatcagctccagcactgacaaaatcccaaaccgatcgtctggaggttctgctgaatccgaaagacgaaatcagcctgaattccggcaaaccgtttcgtgaactggagagcgaactgctgtcacgtcgtaaaaaagacctgcaacaaatctatgccgaagaacgtgagaactatctggggaaactggaacgtgaaatcacccgctttttcgtggatcgtggctttctggagatcaaatccccgattctgattcctctggagtatatcgagcgtatgggcatcgacaatgataccgaactgagcaaacaaattttccgtgtggataaaaacttctgtctgcgccctatgctagcaccaaatctggctaactatctgcgcaaactggaccgtgccctgcctgatcctatcaaaatcttcgagatcggcccgtgttatcgtaaagagtccgacggtaaagaacatctggaggagtttaccatgctgaacttttgccaaatgggttcaggttgtactcgtgagaacctggaaagcatcatcaccgattttctgaaccacctgggcattgacttcaaaattgtgggcgacagctgtatggtgtttggcgacaccctggatgtcatgcacggcgacctggaactgtctagtgccgttgtgggcccaatcccgctggatcgtgagtggggtatcgacaaaccttggatcggtgcgggttttggtctggagcgtctgctgaaagtaaaacacgacttcaagaacatcaaacgtgctgcacgttccgagtcctattacaatggtatttctactaacctgtaa

SEQ ID NO: 68 - protein, 1026 aa, Artificial Sequence
  Description of Artificial Sequence: Synthetic polypeptide
  KIF16B-MCP-PylRS AF
MASVKVAVRVRPMNRREKDLEAKFIIQMEKSKTTITNLKIPEGGTGDSGRERTKTFTYDFSFYSADTKSPDYVSQEMVFKTLGTDVVKSAFEGYNACVFAYGQTGSGKSYTMMGNSGDSGLIPRICEGLFSRINETTRWDEASFRTEVSYLEIYNERVRDLLRRKSSKTFNLRVREHPKEGPYVEDLSKHLVQNYGDVEELMDAGNINRTTAATGMNDVSSRSHAIFTIKFTQAKFDSEMPCETVSKIHLVDLAGSERADATGATGVRLKEGGNINKSLVTLGNVISALADLSQDAANTLAKKKQVFVPYRDSVLTWLLKDSLGGNSKTIMIATISPADVNYGETLSTLRYANRAKNIINKPTINEDANVKLIRELRAEIARLKTLLAQGNQIALLDSPTYTDIEMNRLGKGAPGSAGSAAGSGMASNFTQFVLVDNGGTGDVTVAPSNFANGIAEWISSNSRSQAYKVTCSVRQSSAQNRKYTIKVEVPKGAWRSYLNMELTIPIFATNSDCELIVKAMQGLLKDGNPIPSAIAANSGIYGTGAPGSAGSAAGSGACPVPLQLPPLERLTLDDKKPLNTLISATGLWMSRTGTIHKIKHHEVSRSKIYIEMACGDHLVVNNSRSSRTARALRHHKYRKTCKRCRVSDEDLNKFLTKANEDQTSVKVKVVSAPTRTKKAMPKSVARAPKPLENTEAAQAQPSGSKFSPAIPVSTQESVSVPASVSTSISSISTGATASALVKGNTNPITSMSAPVQASAPALTKSQTDRLEVLLNPKDEISLNSGKPFRELESELLSRRKKDLQQIYAEERENYLGKLEREITRFFVDRGFLEIKSPILIPLEYIERMGIDNDTELSKQIFRVDKNFCLRPMLAPNLANYLRKLDRALPDPIKIFEIGPCYRKESDGKEHLEEFTMLNFCQMGSGCTRENLESIITDFLNHLGIDFKIVGDSCMVFGDTLDVMHGDLELSSAVVGPIPLDREWGIDKPWIGAGFGLERLLKVKHDFKNIKRAARSESYYNGISTNL

SEQ ID NO: 69 - DNA, 6252 bp, Artificial Sequence
  Description of Artificial Sequence: Synthetic polynucleotide
  KIF16B-SPD5-PylRS AF
  CDS (1)..(6252)
atggcatcggtcaaggtggccgtgagggtccggcccatgaatcgcagggaaaaggacttggaggccaagttcattattcagatggagaaaagcaaaacgacaatcacaaacttaaagataccagaaggaggcactggggactcaggaagagaacggaccaagaccttcacctatgacttttctttttattctgctgatacaaaaagcccagattacgtttcacaagaaatggttttcaaaaccctcggcacagatgtcgtgaagtctgcatttgaaggttataatgcttgtgtctttgcatatgggcaaactggatctggaaagtcatacactatgatgggaaattctggagattctggcttaatacctcggatctgtgaaggactcttcagtcggataaatgaaaccaccagatgggatgaagcttcttttcgaactgaagtcagctacttagaaatttataacgaacgtgtgagagatctacttcggcggaagtcatctaaaaccttcaatttgagagtccgtgagcatcccaaagaaggcccttatgttgaggatttatccaaacatttagtacagaattatggtgacgtagaagaacttatggatgcgggcaatatcaaccggaccaccgcagcgactgggatgaacgacgtcagtagcaggtctcatgccatcttcaccatcaagttcactcaggctaaatttgattctgaaatgccatgtgaaaccgtcagtaagatccacttggttgatcttgccggaagtgagcgtgcagatgccaccggagccaccggggttaggctaaaggaagggggaaatattaacaagtccctcgtgactctggggaacgtcatttctgccttagctgatttatctcaggatgctgcaaatactcttgcaaagaagaagcaagttttcgtgccttacagggattctgtgttgacttggttgttaaaagatagccttggaggaaactctaaaactatcatgattgccaccatttcacctgctgatgtcaattatggagaaaccctaagtactcttcgctatgcaaatagagccaaaaacatcatcaacaagcctaccattaatgaggatgccaacgtcaaacttatccgtgagctgcgagctgaaatagccagactgaaaacgctgcttgctcaagggaatcagattgccctcttagactcccccacaatggaggacaacagcgtgctgaacgaggacagcaacctggagcacgtggagggccagcccagaagaagcatgagccagcccgtgctgaacgtggagggcgacaagagaaccagcagcaccagcgccacccagcagcaggtgctgagcggcgccttcagcagcgccgacgtgagaagcatccccatcatccagacctgggaggagaacaaggccctgaagaccaagatcaccatcctgagaggcgagctgcagatgtaccagagaagatacagcgaggccaaggaggccagccagaagagagtgaaggaggtgatggacgactacgtggacctgaagctgggccaggagaacgtgcaggagaagatggagcagtacaagctgatggaggaggacctgctggccatgcagagcagaatcgagaccagcgaggacaacttcgccagacagatgaaggagttcgaggcccagaagcacgccatggaggagagaatcaaggagctggagctgagcgccaccgacgccaacaacaccaccgtgggcagcttcagaggcaccctggacgacatcctgaagaagaacgaccccgacttcaccctgaccagcggctacgaggagagaaagatcaacgacctggaggccaagctgctgagcgagatcgacaaggtggccgagctggaggaccacatccagcagctgagacaggagctggacgaccagagcgccagactggccgacagcgagaacgtgagagcccagctggaggccgccaccggccagggcatcctgggcgccgccggcaacgccatggtgcccaacagcaccttcatgatcggcaacggcagagagagccagaccagagaccagctgaactacatcgacgacctggagaccaagctggccgacgccaagaaggagaacgacaaggccagacaggccctggtggagtacatgaacaagtgcagcaagctggagcacgagatcagaaccatggtgaagaacagcaccttcgacagcagcagcatgctgctgggcggccagaccagcgacgagctgaagatccagatcggcaaggtgaacggcgagctgaacgtgctgagagccgagaacagagagctgagaatcagatgcgaccagctgaccggcggcgacggcaacctgagcatcagcctgggccagagcagactgatggccggcatcgccaccaacgacgtggacagcatcggccagggcaacgagaccggcggcaccagcatgagaatcctgcccagagagagccagctggacgacctggaggagagcaagctgcccctgatggacaccagcagcgccgtgagaaaccagcagcagttcgccagcatgtgggaggacttcgagagcgtgaaggacagcctgcagaacaaccacaacgacaccctggagggcagcttcaacagcagcatgcccccccccggcagagacgccacccagagcttcctgagccagaagagcttcaagaacagccccatcgtgatgcagaagcccaagagcctgcacctgcacctgaagagccaccagagcgagggcgccggcgagcagatccagaacaacagcttcagcaccaagaccgccagcccccacgtgagccagagccacatccccatcctgcacgacatgcagcagatcctggacagcagcgccatgttcctggagggccagcacgacgtggccgtgaacgtggagcagatgcaggagaagatgagccagatcagagaggccctggccagactgttcgagagactgaagagcagcgccgccctgttcgaggagatcctggagagaatgggcagcagcgaccccaacgccgacaagatcaagaagatgaagctggccttcgagaccagcatcaacgacaagctgaacgtgagcgccatcctggaggccgccgagaaggacctgcacaacatgagcctgaacttcagcatcctggagaagagcatcgtgagccaggccgccgaggccagcagaagattcaccatcgcccccgacgccgaggacgtggccagcagcagcctgctgaacgccagctacagccccctgttcaagttcaccagcaacagcgacatcgtggagaagctgcagaacgaggtgagcgagctgaagaacgagctggagatggccagaaccagagacatgagaagccccctgaacggcagcagcggcagactgagcgacgtgcagatcaacaccaacagaatgttcgaggacctggaggtgagcgaggccaccctgcagaaggccaaggaggagaacagcaccctgaagagccagttcgccgagctggaggccaacctgcaccaggtgaacagcaagctgggcgaggtgagatgcgagctgaacgaggccctggccagagtggacggcgagcaggagaccagagtgaaggccgagaacgccctggaggaggccagacagctgatcagcagcctgaagcacgaggagaacgagctgaagaagaccatcaccgacatgggcatgagactgaacgaggccaagaagagcgacgagttcctgaagagcgagctgagcaccgccctggaggaggagaagaagagccagaacctggccgacgagctgagcgaggagctgaacggctggagaatgagaaccaaggaggccgagaacaaggtggagcacgccagcagcgagaagagcgagatgctggagagaatcgtgcacctggagaccgagatggagaagctgagcaccagcgagatcgccgccgactactgcagcaccaagatgaccgagagaaagaaggagatcgagctggccaagtacagagaggacttcgagaacgccgccatcgtgggcctggagagaatcagcaaggagatcagcgagctgaccaagaagaccctgaaggccaagatcatccccagcaacatcagcagcatccagctggtgtgcgacgagctgtgcagaagactgagcagagagagagagcagcagcacgagtacgccaaggtgatgagagacgtgaacgagaagatcgagaagctgcagctggagaaggacgccctggagcacgagctgaagatgatgagcagcaacaacgagaacgtgccccccgtgggcaccagcgtgagcggcatgcccaccaagaccagcaaccagaagtgcgcccagccccactacaccagccccaccagacagctgctgcacgagagcaccatggccgtggacgccatcgtgcagaagctgaagaagacccacaacatgagcggcatgggccccgagctgaaggagaccatcggcaacgtgatcaacgagagcagagtgctgagagacttcctgcaccagaagctgatcctgttcaagggcatcgacatgagcaactggaagaacgagaccgtggaccagctgatcaccgacctgggccagctgcaccaggacaacctgatgctggaggagcagatcaagaagtacaagaaggagctgaagctgaccaagagcgccatccccaccctgggcgtggagttccaggacagaatcaagaccgagatcggcaagatcgccaccgacatgggcggcgccgtgaaggagatcagaaagaagggtaccggcgcccccggctccgccggctccgccgccggctccggcgcgtgcccggtgccgctgcagctgccgccgctggaacgcctgaccctggatgataaaaaaccgctgaataccctgatctctgctactggtctgtggatgagtcgtaccggaaccattcataaaatcaaacaccacgaggttagccgttcgaaaatctatattgagatggcgtgtggcgatcatctggttgtgaacaatagccgctcttctcgtacagcacgtgcactgcgtcaccacaaatatcgtaaaacctgtaaacgttgccgtgtgtccgatgaggatctgaacaaattcctgacaaaagccaatgaggaccaaacaagcgtgaaagtgaaagtcgttagcgctcctacccgtactaaaaaagcaatgccgaaatccgttgctcgtgcccctaaaccactggaaaacactgaagcagcacaggcacagccgtctggaagcaaattctctccggccattcctgtttctacccaggagtccgtttctgttccagcaagtgtgagcaccagcattagcagtattagcaccggtgccaccgctagcgccctggttaaaggcaataccaatccgattacaagcatgtctgccccggttcaagcatcagctccagcactgacaaaatcccaaaccgatcgtctggaggttctgctgaatccgaaagacgaaatcagcctgaattccggcaaaccgtttcgtgaactggagagcgaactgctgtcacgtcgtaaaaaagacctgcaacaaatctatgccgaagaacgtgagaactatctggggaaactggaacgtgaaatcacccgctttttcgtggatcgtggctttctggagatcaaatccccgattctgattcctctggagtatatcgagcgtatgggcatcgacaatgataccgaactgagcaaacaaattttccgtgtggataaaaacttctgtctgcgccctatgctagcaccaaatctggctaactatctgcgcaaactggaccgtgccctgcctgatcctatcaaaatcttcgagatcggcccgtgttatcgtaaagagtccgacggtaaagaacatctggaggagtttaccatgctgaacttttgccaaatgggttcaggttgtactcgtgagaacctggaaagcatcatcaccgattttctgaaccacctgggcattgacttcaaaattgtgggcgacagctgtatggtgtttggcgacaccctggatgtcatgcacggcgacctggaactgtctagtgccgttgtgggcccaatcccgctggatcgtgagtggggtatcgacaaaccttggatcggtgcgggttttggtctggagcgtctgctgaaagtaaaacacgacttcaagaacatcaaacgtgctgcacgttccgagtcctattacaatggtatttctactaacctgtaa

SEQ ID NO: 70 - protein, 2083 aa, Artificial Sequence
  Description of Artificial Sequence: Synthetic polypeptide
  KIF16B-SPD5-PylRS AF
MASVKVAVRVRPMNRREKDLEAKFIIQMEKSKTTITNLKIPEGGTGDSGRERTKTFTYDFSFYSADTKSPDYVSQEMVFKTLGTDVVKSAFEGYNACVFAYGQTGSGKSYTMMGNSGDSGLIPRICEGLFSRINETTRWDEASFRTEVSYLEIYNERVRDLLRRKSSKTFNLRVREHPKEGPYVEDLSKHLVQNYGDVEELMDAGNINRTTAATGMNDVSSRSHAIFTIKFTQAKFDSEMPCETVSKIHLVDLAGSERADATGATGVRLKEGGNINKSLVTLGNVISALADLSQDAANTLAKKKQVFVPYRDSVLTWLLKDSLGGNSKTIMIATISPADVNYGETLSTLRYANRAKNIINKPTINEDANVKLIRELRAEIARLKTLLAQGNQIALLDSPTMEDNSVLNEDSNLEHVEGQPRRSMSQPVLNVEGDKRTSSTSATQQQVLSGAFSSADVRSIPIIQTWEENKALKTKITILRGELQMYQRRYSEAKEASQKRVKEVMDDYVDLKLGQENVQEKMEQYKLMEEDLLAMQSRIETSEDNFARQMKEFEAQKHAMEERIKELELSATDANNTTVGSFRGTLDDILKKNDPDFTLTSGYEERKINDLEAKLLSEIDKVAELEDHIQQLRQELDDQSARLADSENVRAQLEAATGQGILGAAGNAMVPNSTFMIGNGRESQTRDQLNYIDDLETKLADAKKENDKARQALVEYMNKCSKLEHEIRTMVKNSTFDSSSMLLGGQTSDELKIQIGKVNGELNVLRAENRELRIRCDQLTGGDGNLSISLGQSRLMAGIATNDVDSIGQGNETGGTSMRILPRESQLDDLEESKLPLMDTSSAVRNQQQFASMWEDFESVKDSLQNNHNDTLEGSFNSSMPPPGRDATQSFLSQKSFKNSPIVMQKPKSLHLHLKSHQSEGAGEQIQNNSFSTKTASPHVSQSHIPILHDMQQILDSSAMFLEGQHDVAVNVEQMQEKMSQIREALARLFERLKSSAALFEEILERMGSSDPNADKIKKMKLAFETSINDKLNVSAILEAAEKDLHNMSLNFSILEKSIVSQAAEASRRFTIAPDAEDVASSSLLNASYSPLFKFTSNSDIVEKLQNEVSELKNELEMARTRDMRSPLNGSSGRLSDVQINTNRMFEDLEVSEATLQKAKEENSTLKSQFAELEANLHQVNSKLGEVRCELNEALARVDGEQETRVKAENALEEARQLISSLKHEENELKKTITDMGMRLNEAKKSDEFLKSELSTALEEEKKSQNLADELSEELNGWRMRTKEAENKVEHASSEKSEMLERIVHLETEMEKLSTSEIAADYCSTKMTERKKEIELAKYREDFENAAIVGLERISKEISELTKKTLKAKIIPSNISSIQLVCDELCRRLSREREQQHEYAKVMRDVNEKIEKLQLEKDALEHELKMMSSNNENVPPVGTSVSGMPTKTSNQKCAQPHYTSPTRQLLHESTMAVDAIVQKLKKTHNMSGMGPELKETIGNVINESRVLRDFLHQKLILFKGIDMSNWKNETVDQLITDLGQLHQDNLMLEEQIKKYKKELKLTKSAIPTLGVEFQDRIKTEIGKIATDMGGAVKEIRKKGTGAPGSAGSAAGSGACPVPLQLPPLERLTLDDKKPLNTLISATGLWMSRTGTIHKIKHHEVSRSKIYIEMACGDHLVVNNSRSSRTARALRHHKYRKTCKRCRVSDEDLNKFLTKANEDQTSVKVKVVSAPTRTKKAMPKSVARAPKPLENTEAAQAQPSGSKFSPAIPVSTQESVSVPASVSTSISSISTGATASALVKGNTNPITSMSAPVQASAPALTKSQTDRLEVLLNPKDEISLNSGKPFRELESELLSRRKKDLQQIYAEERENYLGKLEREITRFFVDRGFLEIKSPILIPLEYIERMGIDNDTELSKQIFRVDKNFCLRPMLAPNLANYLRKLDRALPDPIKIFEIGPCYRKESDGKEHLEEFTMLNFCQMGSGCTRENLESIITDFLNHLGIDFKIVGDSCMVFGDTLDVMHGDLELSSAVVGPIPLDREWGIDKPWIGAGFGLERLLKVKHDFKNIKRAARSESYYNGISTNL

SEQ ID NO: 71 - DNA, 5220 bp, Artificial Sequence
  Description of Artificial Sequence: Synthetic polynucleotide
  KIF16B-SPD5-MCP
  CDS (1)..(5220)
atggcatcggtcaaggtggccgtgagggtccggcccatgaatcgcagggaaaaggacttggaggccaagttcattattcagatggagaaaagcaaaacgacaatcacaaacttaaagataccagaaggaggcactggggactcaggaagagaacggaccaagaccttcacctatgacttttctttttattctgctgatacaaaaagcccagattacgtttcacaagaaatggttttcaaaaccctcggcacagatgtcgtgaagtctgcatttgaaggttataatgcttgtgtctttgcatatgggcaaactggatctggaaagtcatacactatgatgggaaattctggagattctggcttaatacctcggatctgtgaaggactcttcagtcggataaatgaaaccaccagatgggatgaagcttcttttcgaactgaagtcagctacttagaaatttataacgaacgtgtgagagatctacttcggcggaagtcatctaaaaccttcaatttgagagtccgtgagcatcccaaagaaggcccttatgttgaggatttatccaaacatttagtacagaattatggtgacgtagaagaacttatggatgcgggcaatatcaaccggaccaccgcagcgactgggatgaacgacgtcagtagcaggtctcatgccatcttcaccatcaagttcactcaggctaaatttgattctgaaatgccatgtgaaaccgtcagtaagatccacttggttgatcttgccggaagtgagcgtgcagatgccaccggagccaccggggttaggctaaaggaagggggaaatattaacaagtccctcgtgactctggggaacgtcatttctgccttagctgatttatctcaggatgctgcaaatactcttgcaaagaagaagcaagttttcgtgccttacagggattctgtgttgacttggttgttaaaagatagccttggaggaaactctaaaactatcatgattgccaccatttcacctgctgatgtcaattatggagaaaccctaagtactcttcgctatgcaaatagagccaaaaacatcatcaacaagcctaccattaatgaggatgccaacgtcaaacttatccgtgagctgcgagctgaaatagccagactgaaaacgctgcttgctcaagggaatcagattgccctcttagactcccccacaatggaggacaacagcgtgctgaacgaggacagcaacctggagcacgtggagggccagcccagaagaagcatgagccagcccgtgctgaacgtggagggcgacaagagaaccagcagcaccagcgccacccagcagcaggtgctgagcggcgccttcagcagcgccgacgtgagaagcatccccatcatccagacctgggaggagaacaaggccctgaagaccaagatcaccatcctgagaggcgagctgcagatgtaccagagaagatacagcgaggccaaggaggccagccagaagagagtgaaggaggtgatggacgactacgtggacctgaagctgggccaggagaacgtgcaggagaagatggagcagtacaagctgatggaggaggacctgctggccatgcagagcagaatcgagaccagcgaggacaacttcgccagacagatgaaggagttcgaggcccagaagcacgccatggaggagagaatcaaggagctggagctgagcgccaccgacgccaacaacaccaccgtgggcagcttcagaggcaccctggacgacatcctgaagaagaacgaccccgacttcaccctgaccagcggctacgaggagagaaagatcaacgacctggaggccaagctgctgagcgagatcgacaaggtggccgagctggaggaccacatccagcagctgagacaggagctggacgaccagagcgccagactggccgacagcgagaacgtgagagcccagctggaggccgccaccggccagggcatcctgggcgccgccggcaacgccatggtgcccaacagcaccttcatgatcggcaacggcagagagagccagaccagagaccagctgaactacatcgacgacctggagaccaagctggccgacgccaagaaggagaacgacaaggccagacaggccctggtggagtacatgaacaagtgcagcaagctggagcacgagatcagaaccatggtgaagaacagcaccttcgacagcagcagcatgctgctgggcggccagaccagcgacgagctgaagatccagatcggcaaggtgaacggcgagctgaacgtgctgagagccgagaacagagagctgagaatcagatgcgaccagctgaccggcggcgacggcaacctgagcatcagcctgggccagagcagactgatggccggcatcgccaccaacgacgtggacagcatcggccagggcaacgagaccggcggcaccagcatgagaatcctgcccagagagagccagctggacgacctggaggagagcaagctgcccctgatggacaccagcagcgccgtgagaaaccagcagcagttcgccagcatgtgggaggacttcgagagcgtgaaggacagcctgcagaacaaccacaacgacaccctggagggcagcttcaacagcagcatgcccccccccggcagagacgccacccagagcttcctgagccagaagagcttcaagaacagccccatcgtgatgcagaagcccaagagcctgcacctgcacctgaagagccaccagagcgagggcgccggcgagcagatccagaacaacagcttcagcaccaagaccgccagcccccacgtgagccagagccacatccccatcctgcacgacatgcagcagatcctggacagcagcgccatgttcctggagggccagcacgacgtggccgtgaacgtggagcagatgcaggagaagatgagccagatcagagaggccctggccagactgttcgagagactgaagagcagcgccgccctgttcgaggagatcctggagagaatgggcagcagcgaccccaacgccgacaagatcaagaagatgaagctggccttcgagaccagcatcaacgacaagctgaacgtgagcgccatcctggaggccgccgagaaggacctgcacaacatgagcctgaacttcagcatcctggagaagagcatcgtgagccaggccgccgaggccagcagaagattcaccatcgcccccgacgccgaggacgtggccagcagcagcctgctgaacgccagctacagccccctgttcaagttcaccagcaacagcgacatcgtggagaagctgcagaacgaggtgagcgagctgaagaacgagctggagatggccagaaccagagacatgagaagccccctgaacggcagcagcggcagactgagcgacgtgcagatcaacaccaacagaatgttcgaggacctggaggtgagcgaggccaccctgcagaaggccaaggaggagaacagcaccctgaagagccagttcgccgagctggaggccaacctgcaccaggtgaacagcaagctgggcgaggtgagatgcgagctgaacgaggccctggccagagtggacggcgagcaggagaccagagtgaaggccgagaacgccctggaggaggccagacagctgatcagcagcctgaagcacgaggagaacgagctgaagaagaccatcaccgacatgggcatgagactgaacgaggccaagaagagcgacgagttcctgaagagcgagctgagcaccgccctggaggaggagaagaagagccagaacctggccgacgagctgagcgaggagctgaacggctggagaatgagaaccaaggaggccgagaacaaggtggagcacgccagcagcgagaagagcgagatgctggagagaatcgtgcacctggagaccgagatggagaagctgagcaccagcgagatcgccgccgactactgcagcaccaagatgaccgagagaaagaaggagatcgagctggccaagtacagagaggacttcgagaacgccgccatcgtgggcctggagagaatcagcaaggagatcagcgagctgaccaagaagaccctgaaggccaagatcatccccagcaacatcagcagcatccagctggtgtgcgacgagctgtgcagaagactgagcagagagagagagcagcagcacgagtacgccaaggtgatgagagacgtgaacgagaagatcgagaagctgcagctggagaaggacgccctggagcacgagctgaagatgatgagcagcaacaacgagaacgtgccccccgtgggcaccagcgtgagcggcatgcccaccaagaccagcaaccagaagtgcgcccagccccactacaccagccccaccagacagctgctgcacgagagcaccatggccgtggacgccatcgtgcagaagctgaagaagacccacaacatgagcggcatgggccccgagctgaaggagaccatcggcaacgtgatcaacgagagcagagtgctgagagacttcctgcaccagaagctgatcctgttcaagggcatcgacatgagcaactggaagaacgagaccgtggaccagctgatcaccgacctgggccagctgcaccaggacaacctgatgctggaggagcagatcaagaagtacaagaaggagctgaagctgaccaagagcgccatccccaccctgggcgtggagttccaggacagaatcaagaccgagatcggcaagatcgccaccgacatgggcggcgccgtgaaggagatcagaaagaagggtaccgagcagaagctgatctcagaggaggacctgggcgcccccggctccgccggctccgccgccggctccggcgcttctaactttactcagttcgttctcgtcgacaatggcggaactggcgacgtgactgtcgccccaagcaacttcgctaacgggatcgctgaatggatcagctctaactcgcgttcacaggcttacaaagtaacctgtagcgttcgtcagagctctgcgcagaatcgcaaatacaccatcaaagtcgaggtgcctaaaggcgcctggcgttcgtacttaaatatggaactaaccattccaattttcgccacgaattccgactgcgagcttattgttaaggcaatgcaaggtctcctaaaagatggaaacccgattccctcagcaatcgcagcaaactccggcatctactaa

SEQ ID NO: 72 - protein, 1739 aa, Artificial Sequence
  Description of Artificial Sequence: Synthetic polypeptide
  KIF16B-SPD5-MCP
MASVKVAVRVRPMNRREKDLEAKFIIQMEKSKTTITNLKIPEGGTGDSGRERTKTFTYDFSFYSADTKSPDYVSQEMVFKTLGTDVVKSAFEGYNACVFAYGQTGSGKSYTMMGNSGDSGLIPRICEGLFSRINETTRWDEASFRTEVSYLEIYNERVRDLLRRKSSKTFNLRVREHPKEGPYVEDLSKHLVQNYGDVEELMDAGNINRTTAATGMNDVSSRSHAIFTIKFTQAKFDSEMPCETVSKIHLVDLAGSERADATGATGVRLKEGGNINKSLVTLGNVISALADLSQDAANTLAKKKQVFVPYRDSVLTWLLKDSLGGNSKTIMIATISPADVNYGETLSTLRYANRAKNIINKPTINEDANVKLIRELRAEIARLKTLLAQGNQIALLDSPTMEDNSVLNEDSNLEHVEGQPRRSMSQPVLNVEGDKRTSSTSATQQQVLSGAFSSADVRSIPIIQTWEENKALKTKITILRGELQMYQRRYSEAKEASQKRVKEVMDDYVDLKLGQENVQEKMEQYKLMEEDLLAMQSRIETSEDNFARQMKEFEAQKHAMEERIKELELSATDANNTTVGSFRGTLDDILKKNDPDFTLTSGYEERKINDLEAKLLSEIDKVAELEDHIQQLRQELDDQSARLADSENVRAQLEAATGQGILGAAGNAMVPNSTFMIGNGRESQTRDQLNYIDDLETKLADAKKENDKARQALVEYMNKCSKLEHEIRTMVKNSTFDSSSMLLGGQTSDELKIQIGKVNGELNVLRAENRELRIRCDQLTGGDGNLSISLGQSRLMAGIATNDVDSIGQGNETGGTSMRILPRESQLDDLEESKLPLMDTSSAVRNQQQFASMWEDFESVKDSLQNNHNDTLEGSFNSSMPPPGRDATQSFLSQKSFKNSPIVMQKPKSLHLHLKSHQSEGAGEQIQNNSFSTKTASPHVSQSHIPILHDMQQILDSSAMFLEGQHDVAVNVEQMQEKMSQIREALARLFERLKSSAALFEEILERMGSSDPNADKIKKMKLAFETSINDKLNVSAILEAAEKDLHNMSLNFSILEKSIVSQAAEASRRFTIAPDAEDVASSSLLNASYSPLFKFTSNSDIVEKLQNEVSELKNELEMARTRDMRSPLNGSSGRLSDVQINTNRMFEDLEVSEATLQKAKEENSTLKSQFAELEANLHQVNSKLGEVRCELNEALARVDGEQETRVKAENALEEARQLISSLKHEENELKKTITDMGMRLNEAKKSDEFLKSELSTALEEEKKSQNLADELSEELNGWRMRTKEAENKVEHASSEKSEMLERIVHLETEMEKLSTSEIAADYCSTKMTERKKEIELAKYREDFENAAIVGLERISKEISELTKKTLKAKIIPSNISSIQLVCDELCRRLSREREQQHEYAKVMRDVNEKIEKLQLEKDALEHELKMMSSNNENVPPVGTSVSGMPTKTSNQKCAQPHYTSPTRQLLHESTMAVDAIVQKLKKTHNMSGMGPELKETIGNVINESRVLRDFLHQKLILFKGIDMSNWKNETVDQLITDLGQLHQDNLMLEEQIKKYKKELKLTKSAIPTLGVEFQDRIKTEIGKIATDMGGAVKEIRKKGTEQKLISEEDLGAPGSAGSAAGSGASNFTQFVLVDNGGTGDVTVAPSNFANGIAEWISSNSRSQAYKVTCSVRQSSAQNRKYTIKVEVPKGAWRSYLNMELTIPIFATNSDCELIVKAMQGLLKDGNPIPSAIAANSGIY

SEQ ID NO: 73 - DNA, 6675 bp, Artificial Sequence
  Description of Artificial Sequence: Synthetic polynucleotide
  KIF16B-SPD5-MCP-PylRS AF
  CDS (1)..(6675)
atggcatcggtcaaggtggccgtgagggtccggcccatgaatcgcagggaaaaggacttggaggccaagttcattattcagatggagaaaagcaaaacgacaatcacaaacttaaagataccagaaggaggcactggggactcaggaagagaacggaccaagaccttcacctatgacttttctttttattctgctgatacaaaaagcccagattacgtttcacaagaaatggttttcaaaaccctcggcacagatgtcgtgaagtctgcatttgaaggttataatgcttgtgtctttgcatatgggcaaactggatctggaaagtcatacactatgatgggaaattctggagattctggcttaatacctcggatctgtgaaggactcttcagtcggataaatgaaaccaccagatgggatgaagcttcttttcgaactgaagtcagctacttagaaatttataacgaacgtgtgagagatctacttcggcggaagtcatctaaaaccttcaatttgagagtccgtgagcatcccaaagaaggcccttatgttgaggatttatccaaacatttagtacagaattatggtgacgtagaagaacttatggatgcgggcaatatcaaccggaccaccgcagcgactgggatgaacgacgtcagtagcaggtctcatgccatcttcaccatcaagttcactcaggctaaatttgattctgaaatgccatgtgaaaccgtcagtaagatccacttggttgatcttgccggaagtgagcgtgcagatgccaccggagccaccggggttaggctaaaggaagggggaaatattaacaagtccctcgtgactctggggaacgtcatttctgccttagctgatttatctcaggatgctgcaaatactcttgcaaagaagaagcaagttttcgtgccttacagggattctgtgttgacttggttgttaaaagatagccttggaggaaactctaaaactatcatgattgccaccatttcacctgctgatgtcaattatggagaaaccctaagtactcttcgctatgcaaatagagccaaaaacatcatcaacaagcctaccattaatgaggatgccaacgtcaaacttatccgtgagctgcgagctgaaatagccagactgaaaacgctgcttgctcaagggaatcagattgccctcttagactcccccacaatggaggacaacagcgtgctgaacgaggacagcaacctggagcacgtggagggccagcccagaagaagcatgagccagcccgtgctgaacgtggagggcgacaagagaaccagcagcaccagcgccacccagcagcaggtgctgagcggcgccttcagcagcgccgacgtgagaagcatccccatcatccagacctgggaggagaacaaggccctgaagaccaagatcaccatcctgagaggcgagctgcagatgtaccagagaagatacagcgaggccaaggaggccagccagaagagagtgaaggaggtgatggacgactacgtggacctgaagctgggccaggagaacgtgcaggagaagatggagcagtacaagctgatggaggaggacctgctggccatgcagagcagaatcgagaccagcgaggacaacttcgccagacagatgaaggagttcgaggcccagaagcacgccatggaggagagaatcaaggagctggagctgagcgccaccgacgccaacaacaccaccgtgggcagcttcagaggcaccctggacgacatcctgaagaagaacgaccccgacttcaccctgaccagcggctacgaggagagaaagatcaacgacctggaggccaagctgctgagcgagatcgacaaggtggccgagctggaggaccacatccagcagctgagacaggagctggacgaccagagcgccagactggccgacagcgagaacgtgagagcccagctggaggccgccaccggccagggcatcctgggcgccgccggcaacgccatggtgcccaacagcaccttcatgatcggcaacggcagagagagccagaccagagaccagctgaactacatcgacgacctggagaccaagctggccgacgccaagaaggagaacgacaaggccagacaggccctggtggagtacatgaacaagtgcagcaagctggagcacgagatcagaaccatggtgaagaacagcaccttcgacagcagcagcatgctgctgggcggccagaccagcgacgagctgaagatccagatcggcaaggtgaacggcgagctgaacgtgctgagagccgagaacagagagctgagaatcagatgcgaccagctgaccggcggcgacggcaacctgagcatcagcctgggccagagcagactgatggccggcatcgccaccaacgacgtggacagcatcggccagggcaacgagaccggcggcaccagcatgagaatcctgcccagagagagccagctggacgacctggaggagagcaagctgcccctgatggacaccagcagcgccgtgagaaaccagcagcagttcgccagcatgtgggaggacttcgagagcgtgaaggacagcctgcagaacaaccacaacgacaccctggagggcagcttcaacagcagcatgcccccccccggcagagacgccacccagagcttcctgagccagaagagcttcaagaacagccccatcgtgatgcagaagcccaagagcctgcacctgcacctgaagagccaccagagcgagggcgccggcgagcagatccagaacaacagcttcagcaccaagaccgccagcccccacgtgagccagagccacatccccatcctgcacgacatgcagcagatcctggacagcagcgccatgttcctggagggccagcacgacgtggccgtgaacgtggagcagatgcaggagaagatgagccagatcagagaggccctggccagactgttcgagagactgaagagcagcgccgccctgttcgaggagatcctggagagaatgggcagcagcgaccccaacgccgacaagatcaagaagatgaagctggccttcgagaccagcatcaacgacaagctgaacgtgagcgccatcctggaggccgccgagaaggacctgcacaacatgagcctgaacttcagcatcctggagaagagcatcgtgagccaggccgccgaggccagcagaagattcaccatcgcccccgacgccgaggacgtggccagcagcagcctgctgaacgccagctacagccccctgttcaagttcaccagcaacagcgacatcgtggagaagctgcagaacgaggtgagcgagctgaagaacgagctggagatggccagaaccagagacatgagaagccccctgaacggcagcagcggcagactgagcgacgtgcagatcaacaccaacagaatgttcgaggacctggaggtgagcgaggccaccctgcagaaggccaaggaggagaacagcaccctgaagagccagttcgccgagctggaggccaacctgcaccaggtgaacagcaagctgggcgaggtgagatgcgagctgaacgaggccctggccagagtggacggcgagcaggagaccagagtgaaggccgagaacgccctggaggaggccagacagctgatcagcagcctgaagcacgaggagaacgagctgaagaagaccatcaccgacatgggcatgagactgaacgaggccaagaagagcgacgagttcctgaagagcgagctgagcaccgccctggaggaggagaagaagagccagaacctggccgacgagctgagcgaggagctgaacggctggagaatgagaaccaaggaggccgagaacaaggtggagcacgccagcagcgagaagagcgagatgctggagagaatcgtgcacctggagaccgagatggagaagctgagcaccagcgagatcgccgccgactactgcagcaccaagatgaccgagagaaagaaggagatcgagctggccaagtacagagaggacttcgagaacgccgccatcgtgggcctggagagaatcagcaaggagatcagcgagctgaccaagaagaccctgaaggccaagatcatccccagcaacatcagcagcatccagctggtgtgcgacgagctgtgcagaagactgagcagagagagagagcagcagcacgagtacgccaaggtgatgagagacgtgaacgagaagatcgagaagctgcagctggagaaggacgccctggagcacgagctgaagatgatgagcagcaacaacgagaacgtgccccccgtgggcaccagcgtgagcggcatgcccaccaagaccagcaaccagaagtgcgcccagccccactacaccagccccaccagacagctgctgcacgagagcaccatggccgtggacgccatcgtgcagaagctgaagaagacccacaacatgagcggcatgggccccgagctgaaggagaccatcggcaacgtgatcaacgagagcagagtgctgagagacttcctgcaccagaagctgatcctgttcaagggcatcgacatgagcaactggaagaacgagaccgtggaccagctgatcaccgacctgggccagctgcaccaggacaacctgatgctggaggagcagatcaagaagtacaagaaggagctgaagctgaccaagagcgccatccccaccctgggcgtggagttccaggacagaatcaagaccgagatcggcaagatcgccaccgacatgggcggcgccgtgaaggagatcagaaagaagggtaccgagcagaagctgatctcagaggaggacctgggcgcccccggctccgccggctccgccgccggctccggcgcttctaactttactcagttcgttctcgtcgacaatggcggaactggcgacgtgactgtcgccccaagcaacttcgctaacgggatcgctgaatggatcagctctaactcgcgttcacaggcttacaaagtaacctgtagcgttcgtcagagctctgcgcagaatcgcaaatacaccatcaaagtcgaggtgcctaaaggcgcctggcgttcgtacttaaatatggaactaaccattccaattttcgccacgaattccgactgcgagcttattgttaaggcaatgcaaggtctcctaaaagatggaaacccgattccctcagcaatcgcagcaaactccggcatctacggtaccggcgcccccggctccgccggctccgccgccggctccggcgcgtgcccggtgccgctgcagctgccgccgctggaacgcctgaccctggatgataaaaaaccgctgaataccctgatctctgctactggtctgtggatgagtcgtaccggaaccattcataaaatcaaacaccacgaggttagccgttcgaaaatctatattgagatggcgtgtggcgatcatctggttgtgaacaatagccgctcttctcgtacagcacgtgcactgcgtcaccacaaatatcgtaaaacctgtaaacgttgccgtgtgtccgatgaggatctgaacaaattcctgacaaaagccaatgaggaccaaacaagcgtgaaagtgaaagtcgttagcgctcctacccgtactaaaaaagcaatgccgaaatccgttgctcgtgcccctaaaccactggaaaacactgaagcagcacaggcacagccgtctggaagcaaattctctccggccattcctgtttctacccaggagtccgtttctgttccagcaagtgtgagcaccagcattagcagtattagcaccggtgccaccgctagcgccctggttaaaggcaataccaatccgattacaagcatgtctgccccggttcaagcatcagctccagcactgacaaaatcccaaaccgatcgtctggaggttctgctgaatccgaaagacgaaatcagcctgaattccggcaaaccgtttcgtgaactggagagcgaactgctgtcacgtcgtaaaaaagacctgcaacaaatctatgccgaagaacgtgagaactatctggggaaactggaacgtgaaatcacccgctttttcgtggatcgtggctttctggagatcaaatccccgattctgattcctctggagtatatcgagcgtatgggcatcgacaatgataccgaactgagcaaacaaattttccgtgtggataaaaacttctgtctgcgccctatgctagcaccaaatctggctaactatctgcgcaaactggaccgtgccctgcctgatcctatcaaaatcttcgagatcggcccgtgttatcgtaaagagtccgacggtaaagaacatctggaggagtttaccatgctgaacttttgccaaatgggttcaggttgtactcgtgagaacctggaaagcatcatcaccgattttctgaaccacctgggcattgacttcaaaattgtgggcgacagctgtatggtgtttggcgacaccctggatgtcatgcacggcgacctggaactgtctagtgccgttgtgggcccaatcccgctggatcgtgagtggggtatcgacaaaccttggatcggtgcgggttttggtctggagcgtctgctgaaagtaaaacacgacttcaagaacatcaaacgtgctgcacgttccgagtcctattacaatggtatttctactaacctgtaa

SEQ ID NO: 74 - protein, 2224 aa, Artificial Sequence
  Description of Artificial Sequence: Synthetic polypeptide
  KIF16B-SPD5-MCP-PylRS AF
MASVKVAVRVRPMNRREKDLEAKFIIQMEKSKTTITNLKIPEGGTGDSGRERTKTFTYDFSFYSADTKSPDYVSQEMVFKTLGTDVVKSAFEGYNACVFAYGQTGSGKSYTMMGNSGDSGLIPRICEGLFSRINETTRWDEASFRTEVSYLEIYNERVRDLLRRKSSKTFNLRVREHPKEGPYVEDLSKHLVQNYGDVEELMDAGNINRTTAATGMNDVSSRSHAIFTIKFTQAKFDSEMPCETVSKIHLVDLAGSERADATGATGVRLKEGGNINKSLVTLGNVISALADLSQDAANTLAKKKQVFVPYRDSVLTWLLKDSLGGNSKTIMIATISPADVNYGETLSTLRYANRAKNIINKPTINEDANVKLIRELRAEIARLKTLLAQGNQIALLDSPTMEDNSVLNEDSNLEHVEGQPRRSMSQPVLNVEGDKRTSSTSATQQQVLSGAFSSADVRSIPIIQTWEENKALKTKITILRGELQMYQRRYSEAKEASQKRVKEVMDDYVDLKLGQENVQEKMEQYKLMEEDLLAMQSRIETSEDNFARQMKEFEAQKHAMEERIKELELSATDANNTTVGSFRGTLDDILKKNDPDFTLTSGYEERKINDLEAKLLSEIDKVAELEDHIQQLRQELDDQSARLADSENVRAQLEAATGQGILGAAGNAMVPNSTFMIGNGRESQTRDQLNYIDDLETKLADAKKENDKARQALVEYMNKCSKLEHEIRTMVKNSTFDSSSMLLGGQTSDELKIQIGKVNGELNVLRAENRELRIRCDQLTGGDGNLSISLGQSRLMAGIATNDVDSIGQGNETGGTSMRILPRESQLDDLEESKLPLMDTSSAVRNQQQFASMWEDFESVKDSLQNNHNDTLEGSFNSSMPPPGRDATQSFLSQKSFKNSPIVMQKPKSLHLHLKSHQSEGAGEQIQNNSFSTKTASPHVSQSHIPILHDMQQILDSSAMFLEGQHDVAVNVEQMQEKMSQIREALARLFERLKSSAALFEEILERMGSSDPNADKIKKMKLAFETSINDKLNVSAILEAAEKDLHNMSLNFSILEKSIVSQAAEASRRFTIAPDAEDVASSSLLNASYSPLFKFTSNSDIVEKLQNEVSELKNELEMARTRDMRSPLNGSSGRLSDVQINTNRMFEDLEVSEATLQKAKEENSTLKSQFAELEANLHQVNSKLGEVRCELNEALARVDGEQETRVKAENALEEARQLISSLKHEENELKKTITDMGMRLNEAKKSDEFLKSELSTALEEEKKSQNLADELSEELNGWRMRTKEAENKVEHASSEKSEMLERIVHLETEMEKLSTSEIAADYCSTKMTERKKEIELAKYREDFENAAIVGLERISKEISELTKKTLKAKIIPSNISSIQLVCDELCRRLSREREQQHEYAKVMRDVNEKIEKLQLEKDALEHELKMMSSNNENVPPVGTSVSGMPTKTSNQKCAQPHYTSPTRQLLHESTMAVDAIVQKLKKTHNMSGMGPELKETIGNVINESRVLRDFLHQKLILFKGIDMSNWKNETVDQLITDLGQLHQDNLMLEEQIKKYKKELKLTKSAIPTLGVEFQDRIKTEIGKIATDMGGAVKEIRKKGTEQKLISEEDLGAPGSAGSAAGSGASNFTQFVLVDNGGTGDVTVAPSNFANGIAEWISSNSRSQAYKVTCSVRQSSAQNRKYTIKVEVPKGAWRSYLNMELTIPIFATNSDCELIVKAMQGLLKDGNPIPSAIAANSGIYGTGAPGSAGSAAGSGACPVPLQLPPLERLTLDDKKPLNTLISATGLWMSRTGTIHKIKHHEVSRSKIYIEMACGDHLVVNNSRSSRTARALRHHKYRKTCKRCRVSDEDLNKFLTKANEDQTSVKVKVVSAPTRTKKAMPKSVARAPKPLENTEAAQAQPSGSKFSPAIPVSTQESVSVPASVSTSISSISTGATASALVKGNTNPITSMSAPVQASAPALTKSQTDRLEVLLNPKDEISLNSGKPFRELESELLSRRKKDLQQIYAEERENYLGKLEREITRFFVDRGFLEIKSPILIPLEYIERMGIDNDTELSKQIFRVDKNFCLRPMLAPNLANYLRKLDRALPDPIKIFEIGPCYRKESDGKEHLEEFTMLNFCQMGSGCTRENLESIITDFLNHLGIDFKIVGDSCMVFGDTLDVMHGDLELSSAVVGPIPLDREWGIDKPWIGAGFGLERLLKVKHDFKNIKRAARSESYYNGISTNL

SEQ ID NO: 75 - DNA, 6753 bp, Artificial Sequence
  Description of Artificial Sequence: Synthetic polynucleotide
  KIF16B-SPD5-4x Lambda N22-PylRS AF
  CDS (1)..(6753)
atggcatcggtcaaggtggccgtgagggtccggcccatgaatcgcagggaaaaggacttggaggccaagttcattattcagatggagaaaagcaaaacgacaatcacaaacttaaagataccagaaggaggcactggggactcaggaagagaacggaccaagaccttcacctatgacttttctttttattctgctgatacaaaaagcccagattacgtttcacaagaaatggttttcaaaaccctcggcacagatgtcgtgaagtctgcatttgaaggttataatgcttgtgtctttgcatatgggcaaactggatctggaaagtcatacactatgatgggaaattctggagattctggcttaatacctcggatctgtgaaggactcttcagtcggataaatgaaaccaccagatgggatgaagcttcttttcgaactgaagtcagctacttagaaatttataacgaacgtgtgagagatctacttcggcggaagtcatctaaaaccttcaatttgagagtccgtgagcatcccaaagaaggcccttatgttgaggatttatccaaacatttagtacagaattatggtgacgtagaagaacttatggatgcgggcaatatcaaccggaccaccgcagcgactgggatgaacgacgtcagtagcaggtctcatgccatcttcaccatcaagttcactcaggctaaatttgattctgaaatgccatgtgaaaccgtcagtaagatccacttggttgatcttgccggaagtgagcgtgcagatgccaccggagccaccggggttaggctaaaggaagggggaaatattaacaagtccctcgtgactctggggaacgtcatttctgccttagctgatttatctcaggatgctgcaaatactcttgcaaagaagaagcaagttttcgtgccttacagggattctgtgttgacttggttgttaaaagatagccttggaggaaactctaaaactatcatgattgccaccatttcacctgctgatgtcaattatggagaaaccctaagtactcttcgctatgcaaatagagccaaaaacatcatcaacaagcctaccattaatgaggatgccaacgtcaaacttatccgtgagctgcgagctgaaatagccagactgaaaacgctgcttgctcaagggaatcagattgccctcttagactcccccacaatggaggacaacagcgtgctgaacgaggacagcaacctggagcacgtggagggccagcccagaagaagcatgagccagcccgtgctgaacgtggagggcgacaagagaaccagcagcaccagcgccacccagcagcaggtgctgagcggcgccttcagcagcgccgacgtgagaagcatccccatcatccagacctgggaggagaacaaggccctgaagaccaagatcaccatcctgagaggcgagctgcagatgtaccagagaagatacagcgaggccaaggaggccagccagaagagagtgaaggaggtgatggacgactacgtggacctgaagctgggccaggagaacgtgcaggagaagatggagcagtacaagctgatggaggaggacctgctggccatgcagagcagaatcgagaccagcgaggacaacttcgccagacagatgaaggagttcgaggcccagaagcacgccatggaggagagaatcaaggagctggagctgagcgccaccgacgccaacaacaccaccgtgggcagcttcagaggcaccctggacgacatcctgaagaagaacgaccccgacttcaccctgaccagcggctacgaggagagaaagatcaacgacctggaggccaagctgctgagcgagatcgacaaggtggccgagctggaggaccacatccagcagctgagacaggagctggacgaccagagcgccagactggccgacagcgagaacgtgagagcccagctggaggccgccaccggccagggcatcctgggcgccgccggcaacgccatggtgcccaacagcaccttcatgatcggcaacggcagagagagccagaccagagaccagctgaactacatcgacgacctggagaccaagctggccgacgccaagaaggagaacgacaaggccagacaggccctggtggagtacatgaacaagtgcagcaagctggagcacgagatcagaaccatggtgaagaacagcaccttcgacagcagcagcatgctgctgggcggccagaccagcgacgagctgaagatccagatcggcaaggtgaacggcgagctgaacgtgctgagagccgagaacagagagctgagaatcagatgcgaccagctgaccggcggcgacggcaacctgagcatcagcctgggccagagcagactgatggccggcatcgccaccaacgacgtggacagcatcggccagggcaacgagaccggcggcaccagcatgagaatcctgcccagagagagccagctggacgacctggaggagagcaagctgcccctgatggacaccagcagcgccgtgagaaaccagcagcagttcgccagcatgtgggaggacttcgagagcgtgaaggacagcctgcagaacaaccacaacgacaccctggagggcagcttcaacagcagcatgcccccccccggcagagacgccacccagagcttcctgagccagaagagcttcaagaacagccccatcgtgatgcagaagcccaagagcctgcacctgcacctgaagagccaccagagcgagggcgccggcgagcagatccagaacaacagcttcagcaccaagaccgccagcccccacgtgagccagagccacatccccatcctgcacgacatgcagcagatcctggacagcagcgccatgttcctggagggccagcacgacgtggccgtgaacgtggagcagatgcaggagaagatgagccagatcagagaggccctggccagactgttcgagagactgaagagcagcgccgccctgttcgaggagatcctggagagaatgggcagcagcgaccccaacgccgacaagatcaagaagatgaagctggccttcgagaccagcatcaacgacaagctgaacgtgagcgccatcctggaggccgccgagaaggacctgcacaacatgagcctgaacttcagcatcctggagaagagcatcgtgagccaggccgccgaggccagcagaagattcaccatcgcccccgacgccgaggacgtggccagcagcagcctgctgaacgccagctacagccccctgttcaagttcaccagcaacagcgacatcgtggagaagctgcagaacgaggtgagcgagctgaagaacgagctggagatggccagaaccagagacatgagaagccccctgaacggcagcagcggcagactgagcgacgtgcagatcaacaccaacagaatgttcgaggacctggaggtgagcgaggccaccctgcagaaggccaaggaggagaacagcaccctgaagagccagttcgccgagctggaggccaacctgcaccaggtgaacagcaagctgggcgaggtgagatgcgagctgaacgaggccctggccagagtggacggcgagcaggagaccagagtgaaggccgagaacgccctggaggaggccagacagctgatcagcagcctgaagcacgaggagaacgagctgaagaagaccatcaccgacatgggcatgagactgaacgaggccaagaagagcgacgagttcctgaagagcgagctgagcaccgccctggaggaggagaagaagagccagaacctggccgacgagctgagcgaggagctgaacggctggagaatgagaaccaaggaggccgagaacaaggtggagcacgccagcagcgagaagagcgagatgctggagagaatcgtgcacctggagaccgagatggagaagctgagcaccagcgagatcgccgccgactactgcagcaccaagatgaccgagagaaagaaggagatcgagctggccaagtacagagaggacttcgagaacgccgccatcgtgggcctggagagaatcagcaaggagatcagcgagctgaccaagaagaccctgaaggccaagatcatccccagcaacatcagcagcatccagctggtgtgcgacgagctgtgcagaagactgagcagagagagagagcagcagcacgagtacgccaaggtgatgagagacgtgaacgagaagatcgagaagctgcagctggagaaggacgccctggagcacgagctgaagatgatgagcagcaacaacgagaacgtgccccccgtgggcaccagcgtgagcggcatgcccaccaagaccagcaaccagaagtgcgcccagccccactacaccagccccaccagacagctgctgcacgagagcaccatggccgtggacgccatcgtgcagaagctgaagaagacccacaacatgagcggcatgggccccgagctgaaggagaccatcggcaacgtgatcaacgagagcagagtgctgagagacttcctgcaccagaagctgatcctgttcaagggcatcgacatgagcaactggaagaacgagaccgtggaccagctgatcaccgacctgggccagctgcaccaggacaacctgatgctggaggagcagatcaagaagtacaagaaggagctgaagctgaccaagagcgccatccccaccctgggcgtggagttccaggacagaatcaagaccgagatcggcaagatcgccaccgacatgggcggcgccgtgaaggagatcagaaagaagtccggatatccctatgatgtgccggattatgcttccaccatggacgcacaaacacgacgacgtgagcgtcgcgctgagaaacaagctcaatggaaagctgcaaacccaccgctcgacggagccggagctggcgctggagctggagccggagctggcggtctagccaccatggacgcacaaacacgacgacgtgagcgtcgcgctgagaaacaagctcaatggaaagctgcaaacccaccgctcgacggagccggagctggcgctggagctggagccggagctggcggtctagccaccatggacgcacaaacacgacgacgtgagcgtcgcgctgagaaacaagctcaatggaaagctgcaaacccaccgctcgacggagccggagctggcgctggagctggagccggagctggcggtctagccaccatggacgcacaaacacgacgacgtgagcgtcgcgctgagaaacaagctcaatggaaagctgcaaacccaccgctcggtaccggcgcccccggctccgccggctccgccgccggctccggcgcgtgcccggtgccgctgcagctgccgccgctggaacgcctgaccctggatgataaaaaaccgctgaataccctgatctctgctactggtctgtggatgagtcgtaccggaaccattcataaaatcaaacaccacgaggttagccgttcgaaaatctatattgagatggcgtgtggcgatcatctggttgtgaacaatagccgctcttctcgtacagcacgtgcactgcgtcaccacaaatatcgtaaaacctgtaaacgttgccgtgtgtccgatgaggatctgaacaaattcctgacaaaagccaatgaggaccaaacaagcgtgaaagtgaaagtcgttagcgctcctacccgtactaaaaaagcaatgccgaaatccgttgctcgtgcccctaaaccactggaaaacactgaagcagcacaggcacagccgtctggaagcaaattctctccggccattcctgtttctacccaggagtccgtttctgttccagcaagtgtgagcaccagcattagcagtattagcaccggtgccaccgctagcgccctggttaaaggcaataccaatccgattacaagcatgtctgccccggttcaagcatcagctccagcactgacaaaatcccaaaccgatcgtctggaggttctgctgaatccgaaagacgaaatcagcctgaattccggcaaaccgtttcgtgaactggagagcgaactgctgtcacgtcgtaaaaaagacctgcaacaaatctatgccgaagaacgtgagaactatctggggaaactggaacgtgaaatcacccgctttttcgtggatcgtggctttctggagatcaaatccccgattctgattcctctggagtatatcgagcgtatgggcatcgacaatgataccgaactgagcaaacaaattttccgtgtggataaaaacttctgtctgcgccctatgctagcaccaaatctggctaactatctgcgcaaactggaccgtgccctgcctgatcctatcaaaatcttcgagatcggcccgtgttatcgtaaagagtccgacggtaaagaacatctggaggagtttaccatgctgaacttttgccaaatgggttcaggttgtactcgtgagaacctggaaagcatcatcaccgattttctgaaccacctgggcattgacttcaaaattgtgggcgacagctgtatggtgtttggcgacaccctggatgtcatgcacggcgacctggaactgtctagtgccgttgtgggcccaatcccgctggatcgtgagtggggtatcgacaaaccttggatcggtgcgggttttggtctggagcgtctgctgaaagtaaaacacgacttcaagaacatcaaacgtgctgcacgttccgagtcctattacaatggtatttctactaacctgtaa

SEQ ID NO: 76 - protein, 2250 aa, Artificial Sequence
  Description of Artificial Sequence: Synthetic polypeptide
  KIF16B-SPD5-4x Lambda N22-PylRS AF
MASVKVAVRVRPMNRREKDLEAKFIIQMEKSKTTITNLKIPEGGTGDSGRERTKTFTYDFSFYSADTKSPDYVSQEMVFKTLGTDVVKSAFEGYNACVFAYGQTGSGKSYTMMGNSGDSGLIPRICEGLFSRINETTRWDEASFRTEVSYLEIYNERVRDLLRRKSSKTFNLRVREHPKEGPYVEDLSKHLVQNYGDVEELMDAGNINRTTAATGMNDVSSRSHAIFTIKFTQAKFDSEMPCETVSKIHLVDLAGSERADATGATGVRLKEGGNINKSLVTLGNVISALADLSQDAANTLAKKKQVFVPYRDSVLTWLLKDSLGGNSKTIMIATISPADVNYGETLSTLRYANRAKNIINKPTINEDANVKLIRELRAEIARLKTLLAQGNQIALLDSPTMEDNSVLNEDSNLEHVEGQPRRSMSQPVLNVEGDKRTSSTSATQQQVLSGAFSSADVRSIPIIQTWEENKALKTKITILRGELQMYQRRYSEAKEASQKRVKEVMDDYVDLKLGQENVQEKMEQYKLMEEDLLAMQSRIETSEDNFARQMKEFEAQKHAMEERIKELELSATDANNTTVGSFRGTLDDILKKNDPDFTLTSGYEERKINDLEAKLLSEIDKVAELEDHIQQLRQELDDQSARLADSENVRAQLEAATGQGILGAAGNAMVPNSTFMIGNGRESQTRDQLNYIDDLETKLADAKKENDKARQALVEYMNKCSKLEHEIRTMVKNSTFDSSSMLLGGQTSDELKIQIGKVNGELNVLRAENRELRIRCDQLTGGDGNLSISLGQSRLMAGIATNDVDSIGQGNETGGTSMRILPRESQLDDLEESKLPLMDTSSAVRNQQQFASMWEDFESVKDSLQNNHNDTLEGSFNSSMPPPGRDATQSFLSQKSFKNSPIVMQKPKSLHLHLKSHQSEGAGEQIQNNSFSTKTASPHVSQSHIPILHDMQQILDSSAMFLEGQHDVAVNVEQMQEKMSQIREALARLFERLKSSAALFEEILERMGSSDPNADKIKKMKLAFETSINDKLNVSAILEAAEKDLHNMSLNFSILEKSIVSQAAEASRRFTIAPDAEDVASSSLLNASYSPLFKFTSNSDIVEKLQNEVSELKNELEMARTRDMRSPLNGSSGRLSDVQINTNRMFEDLEVSEATLQKAKEENSTLKSQFAELEANLHQVNSKLGEVRCELNEALARVDGEQETRVKAENALEEARQLISSLKHEENELKKTITDMGMRLNEAKKSDEFLKSELSTALEEEKKSQNLADELSEELNGWRMRTKEAENKVEHASSEKSEMLERIVHLETEMEKLSTSEIAADYCSTKMTERKKEIELAKYREDFENAAIVGLERISKEISELTKKTLKAKIIPSNISSIQLVCDELCRRLSREREQQHEYAKVMRDVNEKIEKLQLEKDALEHELKMMSSNNENVPPVGTSVSGMPTKTSNQKCAQPHYTSPTRQLLHESTMAVDAIVQKLKKTHNMSGMGPELKETIGNVINESRVLRDFLHQKLILFKGIDMSNWKNETVDQLITDLGQLHQDNLMLEEQIKKYKKELKLTKSAIPTLGVEFQDRIKTEIGKIATDMGGAVKEIRKKSGYPYDVPDYASTMDAQTRRRERRAEKQAQWKAANPPLDGAGAGAGAGAGAGGLATMDAQTRRRERRAEKQAQWKAANPPLDGAGAGAGAGAGAGGLATMDAQTRRRERRAEKQAQWKAANPPLDGAGAGAGAGAGAGGLATMDAQTRRRERRAEKQAQWKAANPPLGTGAPGSAGSAAGSGACPVPLQLPPLERLTLDDKKPLNTLISATGLWMSRTGTIHKIKHHEVSRSKIYIEMACGDHLVVNNSRSSRTARALRHHKYRKTCKRCRVSDEDLNKFLTKANEDQTSVKVKVVSAPTRTKKAMPKSVARAPKPLENTEAAQAQPSGSKFSPAIPVSTQESVSVPASVSTSISSISTGATASALVKGNTNPITSMSAPVQASAPALTKSQTDRLEVLLNPKDEISLNSGKPFRELESELLSRRKKDLQQIYAEERENYLGKLEREITRFFVDRGFLEIKSPILIPLEYIERMGIDNDTELSKQIFRVDKNFCLRPMLAPNLANYLRKLDRALPDPIKIFEIGPCYRKESDGKEHLEEFTMLNFCQMGSGCTRENLESIITDFLNHLGIDFKIVGDSCMVFGDTLDVMHGDLELSSAVVGPIPLDREWGIDKPWIGAGFGLERLLKVKHDFKNIKRAARSESYYNGISTNL

SEQ ID NO: 77 - DNA, 4218 bp, Artificial Sequence
  Description of Artificial Sequence: Synthetic polynucleotide
  KIF13A-FUS-PylRS AF
  CDS (1)..(4218)
atgtcggataccaaggtaaaagttgccgtccgggtccggcccatgaaccgacgagaactggaactgaacaccaagtgcgtggtggagatggaagggaatcaaacggtcctgcaccctcctccttctaacaccaaacagggagaaaggaaacctcccaaggtatttgcctttgattattgcttttggtccatggatgaatctaacactacaaaatacgctggtcaagaagtggttttcaagtgccttggggaaggaattcttgaaaaagcctttcaggggtataatgcgtgtatttttgcatatggacagacaggttcgggaaaatccttttccatgatgggccatgctgagcagctgggccttattccaaggctctgctgtgctttatttaaaaggatctctttggagcaaaatgagtcacagacctttaaagttgaagtgtcctatatggaaatttataatgagaaagttcgggatcttttagaccccaaagggagtagacagtctcttaaagttcgagaacataaagttttgggaccatatgtagatggtttatctcaactagctgtcactagttttgaggatattgagtcattgatgtctgagggaaataagtctcgaacggtagctgctaccaacatgaacgaagaaagcagccgctcccatgctgtgttcaacatcataatcacacagacactttatgacctgcagtctgggaattccggggagaaagtcagtaaggtcagcttggtagacctggcgggtagcgaaagagtatctaaaacaggagctgcaggagagcgactgaaagaaggcagcaacattaacaaatcgcttacaaccttggggttggttatatcatcactggctgaccaggcagctggcaagggtaaaagcaaatttgtgccttatcgagattcagtcctcacttggctgcttaaggacaacttggggggcaacagccaaacctctatgatagccacaatcagcccagccgcagacaactatgaagagaccctctccacattaagatatgcagaccgagccaaaaggattgtgaaccatgctgttgtgaatgaggaccccaacgcaaaagtgatccgagaactgcgggaggaagtcgagaaactgagagagcagctctctcaggcagaggccatgaaggccgaactgaaggagaagctcgaagagtctgaaaagctgataaaagaactaacagtgacttgggaatatacagatattgaaatgaacagattgggaaagggcgcccccggctccgccggctccgccgccggctccggcatggcctcaaacgattatacccaacaagcaacccaaagctatggggcctaccccacccagcccgggcagggctattcccagcagagcagtcagccctacggacagcagagttacagtggttatagccagtccacggacacttcaggatatggccagagcagctattcttcttatggccagagccagaacacaggctatggaactcagtcaactccccagggatatggctcgactggcggctatggcagtagccagagctcccaatcgtcttacgggcagcagtcctcctaccctggctatggccagcagccagctcccagcagcacctcgggaagttacggtagcagttctcagagcagcagctatgggcagccccagagtgggagctacagccagcagcctagctatggtggacagcagcaaagctatggacagcagcaaagctataatccccctcagggctatggacagcagaaccagtacaacagcagcagtggtggtggaggtggaggtggaggtggaggtaactatggccaagatcaatcctccatgagtagtggtggtggcagtggtggcggttatggcaatcaagaccagagtggtggaggtggcagcggtggctatggacagcaggaccgtggaggccgcggcaggggtggcagtggtggcggcggcggcggcggcggtggtggttacaaccgcagcagtggtggctatgaacccagaggtcgtggaggtggccgtggaggcagaggtggcatgggcggaagtgaccgtggtggcttcaataaatttggtggccctcgggaccaaggatcacgtcatgactccgaacaggataattcagacaacaacaccatctttgtgcaaggcctgggtgagaatgttacaattgagtctgtggctgattacttcaagcagattggtattattaagacaaacaagaaaacgggacagcccatgattaatttgtacacagacagggaaactggcaagctgaagggagaggcaacggtctcttttgatgacccaccttcagctaaagcagctattgactggtttgatggtaaagaattctccggaaatcctatcaaggtctcatttgctactcgccgggcagactttaatcggggtggtggcaatggtcgtggaggccgagggcgaggaggacccatgggccgtggaggctatggaggtggtggcagtggtggtggtggccgaggaggatttcccagtggaggtggtggcggtggaggacagcagcgagctggtgactggaagtgtcctaatcccacctgtgagaatatgaacttctcttggaggaatgaatgcaaccagtgtaaggcccctaaaccagatggcccaggagggggaccaggtggctctcacatggggggtaactacggggatgatcgtcgtggtggcagaggaggcgattacaaggatgacgacgataagggtaccggcgcccccggctccgccggctccgccgccggctccggcgcgtgcccggtgccgctgcagctgccgccgctggaacgcctgaccctggatgataaaaaaccgctgaataccctgatctctgctactggtctgtggatgagtcgtaccggaaccattcataaaatcaaacaccacgaggttagccgttcgaaaatctatattgagatggcgtgtggcgatcatctggttgtgaacaatagccgctcttctcgtacagcacgtgcactgcgtcaccacaaatatcgtaaaacctgtaaacgttgccgtgtgtccgatgaggatctgaacaaattcctgacaaaagccaatgaggaccaaacaagcgtgaaagtgaaagtcgttagcgctcctacccgtactaaaaaagcaatgccgaaatccgttgctcgtgcccctaaaccactggaaaacactgaagcagcacaggcacagccgtctggaagcaaattctctccggccattcctgtttctacccaggagtccgtttctgttccagcaagtgtgagcaccagcattagcagtattagcaccggtgccaccgctagcgccctggttaaaggcaataccaatccgattacaagcatgtctgccccggttcaagcatcagctccagcactgacaaaatcccaaaccgatcgtctggaggttctgctgaatccgaaagacgaaatcagcctgaattccggcaaaccgtttcgtgaactggagagcgaactgctgtcacgtcgtaaaaaagacctgcaacaaatctatgccgaagaacgtgagaactatctggggaaactggaacgtgaaatcacccgctttttcgtggatcgtggctttctggagatcaaatccccgattctgattcctctggagtatatcgagcgtatgggcatcgacaatgataccgaactgagcaaacaaattttccgtgtggataaaaacttctgtctgcgccctatgctagcaccaaatctggctaactatctgcgcaaactggaccgtgccctgcctgatcctatcaaaatcttcgagatcggcccgtgttatcgtaaagagtccgacggtaaagaacatctggaggagtttaccatgctgaacttttgccaaatgggttcaggttgtactcgtgagaacctggaaagcatcatcaccgattttctgaaccacctgggcattgacttcaaaattgtgggcgacagctgtatggtgtttggcgacaccctggatgtcatgcacggcgacctggaactgtctagtgccgttgtgggcccaatcccgctggatcgtgagtggggtatcgacaaaccttggatcggtgcgggttttggtctggagcgtctgctgaaagtaaaacacgacttcaagaacatcaaacgtgctgcacgttccgagtcctattacaatggtatttctactaacctgtaa

SEQ ID NO: 78 - protein, 1405 aa, Artificial Sequence
  Description of Artificial Sequence: Synthetic polypeptide
  KIF13A-FUS-PylRS AF
MSDTKVKVAVRVRPMNRRELELNTKCVVEMEGNQTVLHPPPSNTKQGERKPPKVFAFDYCFWSMDESNTTKYAGQEVVFKCLGEGILEKAFQGYNACIFAYGQTGSGKSFSMMGHAEQLGLIPRLCCALFKRISLEQNESQTFKVEVSYMEIYNEKVRDLLDPKGSRQSLKVREHKVLGPYVDGLSQLAVTSFEDIESLMSEGNKSRTVAATNMNEESSRSHAVFNIIITQTLYDLQSGNSGEKVSKVSLVDLAGSERVSKTGAAGERLKEGSNINKSLTTLGLVISSLADQAAGKGKSKFVPYRDSVLTWLLKDNLGGNSQTSMIATISPAADNYEETLSTLRYADRAKRIVNHAVVNEDPNAKVIRELREEVEKLREQLSQAEAMKAELKEKLEESEKLIKELTVTWEYTDIEMNRLGKGAPGSAGSAAGSGMASNDYTQQATQSYGAYPTQPGQGYSQQSSQPYGQQSYSGYSQSTDTSGYGQSSYSSYGQSQNTGYGTQSTPQGYGSTGGYGSSQSSQSSYGQQSSYPGYGQQPAPSSTSGSYGSSSQSSSYGQPQSGSYSQQPSYGGQQQSYGQQQSYNPPQGYGQQNQYNSSSGGGGGGGGGGNYGQDQSSMSSGGGSGGGYGNQDQSGGGGSGGYGQQDRGGRGRGGSGGGGGGGGGGYNRSSGGYEPRGRGGGRGGRGGMGGSDRGGFNKFGGPRDQGSRHDSEQDNSDNNTIFVQGLGENVTIESVADYFKQIGIIKTNKKTGQPMINLYTDRETGKLKGEATVSFDDPPSAKAAIDWFDGKEFSGNPIKVSFATRRADFNRGGGNGRGGRGRGGPMGRGGYGGGGSGGGGRGGFPSGGGGGGGQQRAGDWKCPNPTCENMNFSWRNECNQCKAPKPDGPGGGPGGSHMGGNYGDDRRGGRGGDYKDDDDKGTGAPGSAGSAAGSGACPVPLQLPPLERLTLDDKKPLNTLISATGLWMSRTGTIHKIKHHEVSRSKIYIEMACGDHLVVNNSRSSRTARALRHHKYRKTCKRCRVSDEDLNKFLTKANEDQTSVKVKVVSAPTRTKKAMPKSVARAPKPLENTEAAQAQPSGSKFSPAIPVSTQESVSVPASVSTSISSISTGATASALVKGNTNPITSMSAPVQASAPALTKSQTDRLEVLLNPKDEISLNSGKPFRELESELLSRRKKDLQQIYAEERENYLGKLEREITRFFVDRGFLEIKSPILIPLEYIERMGIDNDTELSKQIFRVDKNFCLRPMLAPNLANYLRKLDRALPDPIKIFEIGPCYRKESDGKEHLEEFTMLNFCQMGSGCTRENLESIITDFLNHLGIDFKIVGDSCMVFGDTLDVMHGDLELSSAVVGPIPLDREWGIDKPWIGAGFGLERLLKVKHDFKNIKRAARSESYYNGISTNL

SEQ ID NO: 79 - DNA, 4191 bp, Artificial Sequence
  Description of Artificial Sequence: Synthetic polynucleotide
  KIF13A-FUS-PylRS AA
  CDS (1)..(4191)
atgtcggataccaaggtaaaagttgccgtccgggtccggcccatgaaccgacgagaactggaactgaacaccaagtgcgtggtggagatggaagggaatcaaacggtcctgcaccctcctccttctaacaccaaacagggagaaaggaaacctcccaaggtatttgcctttgattattgcttttggtccatggatgaatctaacactacaaaatacgctggtcaagaagtggttttcaagtgccttggggaaggaattcttgaaaaagcctttcaggggtataatgcgtgtatttttgcatatggacagacaggttcgggaaaatccttttccatgatgggccatgctgagcagctgggccttattccaaggctctgctgtgctttatttaaaaggatctctttggagcaaaatgagtcacagacctttaaagttgaagtgtcctatatggaaatttataatgagaaagttcgggatcttttagaccccaaagggagtagacagtctcttaaagttcgagaacataaagttttgggaccatatgtagatggtttatctcaactagctgtcactagttttgaggatattgagtcattgatgtctgagggaaataagtctcgaacggtagctgctaccaacatgaacgaagaaagcagccgctcccatgctgtgttcaacatcataatcacacagacactttatgacctgcagtctgggaattccggggagaaagtcagtaaggtcagcttggtagacctggcgggtagcgaaagagtatctaaaacaggagctgcaggagagcgactgaaagaaggcagcaacattaacaaatcgcttacaaccttggggttggttatatcatcactggctgaccaggcagctggcaagggtaaaagcaaatttgtgccttatcgagattcagtcctcacttggctgcttaaggacaacttggggggcaacagccaaacctctatgatagccacaatcagcccagccgcagacaactatgaagagaccctctccacattaagatatgcagaccgagccaaaaggattgtgaaccatgctgttgtgaatgaggaccccaacgcaaaagtgatccgagaactgcgggaggaagtcgagaaactgagagagcagctctctcaggcagaggccatgaaggccgaactgaaggagaagctcgaagagtctgaaaagctgataaaagaactaacagtgacttgggaatatacagatattgaaatgaacagattgggaaagggcgcccccggctccgccggctccgccgccggctccggcatggcctcaaacgattatacccaacaagcaacccaaagctatggggcctaccccacccagcccgggcagggctattcccagcagagcagtcagccctacggacagcagagttacagtggttatagccagtccacggacacttcaggatatggccagagcagctattcttcttatggccagagccagaacacaggctatggaactcagtcaactccccagggatatggctcgactggcggctatggcagtagccagagctcccaatcgtcttacgggcagcagtcctcctaccctggctatggccagcagccagctcccagcagcacctcgggaagttacggtagcagttctcagagcagcagctatgggcagccccagagtgggagctacagccagcagcctagctatggtggacagcagcaaagctatggacagcagcaaagctataatccccctcagggctatggacagcagaaccagtacaacagcagcagtggtggtggaggtggaggtggaggtggaggtaactatggccaagatcaatcctccatgagtagtggtggtggcagtggtggcggttatggcaatcaagaccagagtggtggaggtggcagcggtggctatggacagcaggaccgtggaggccgcggcaggggtggcagtggtggcggcggcggcggcggcggtggtggttacaaccgcagcagtggtggctatgaacccagaggtcgtggaggtggccgtggaggcagaggtggcatgggcggaagtgaccgtggtggcttcaataaatttggtggccctcgggaccaaggatcacgtcatgactccgaacaggataattcagacaacaacaccatctttgtgcaaggcctgggtgagaatgttacaattgagtctgtggctgattacttcaagcagattggtattattaagacaaacaagaaaacgggacagcccatgattaatttgtacacagacagggaaactggcaagctgaagggagaggcaacggtctcttttgatgacccaccttcagctaaagcagctattgactggtttgatggtaaagaattctccggaaatcctatcaaggtctcatttgctactcgccgggcagactttaatcggggtggtggcaatggtcgtggaggccgagggcgaggaggacccatgggccgtggaggctatggaggtggtggcagtggtggtggtggccgaggaggatttcccagtggaggtggtggcggtggaggacagcagcgagctggtgactggaagtgtcctaatcccacctgtgagaatatgaacttctcttggaggaatgaatgcaaccagtgtaaggcccctaaaccagatggcccaggagggggaccaggtggctctcacatggggggtaactacggggatgatcgtcgtggtggcagaggaggcggcgcccccggctccgccggctccgccgccggctccggcatggcgtgcccggtgccgctgcagctgccgccgctggaacgcctgaccctggatgacaaaaaaccgctgaataccctgatctctgctactggtctgtggatgagtcgtaccggaaccattcataaaatcaaacaccacgaggttagccgttcgaaaatctatattgagatggcgtgtggcgatcatctggttgtgaacaatagccgctcttctcgtacagcacgtgcactgcgtcaccacaaatatcgtaaaacctgtaaacgttgccgtgtgtccgatgaggatctgaacaaattcctgacaaaagccaatgaggaccaaacaagcgtgaaagtgaaagtcgttagcgctcctacccgtactaaaaaagcaatgccgaaatccgttgctcgtgcccctaaaccactggaaaacactgaagcagcacaggcacagccgtctggaagcaaattctctccggccattcctgtttctacccaggagtccgtttctgttccagcaagtgtgagcaccagcattagcagtattagcaccggtgccaccgctagcgccctggttaaaggcaataccaatccgattacaagcatgtctgccccggttcaagcatcagctccagcactgacaaaatcccaaaccgatcgtctggaggttctgctgaatccgaaagacgaaatcagcctgaattccggcaaaccgtttcgtgaactggagagcgaactgctgtcacgtcgtaaaaaagacctgcaacaaatctatgccgaagaacgtgagaactatctggggaaactggaacgtgaaatcacccgctttttcgtggatcgtggctttctggagatcaaatccccgattctgattcctctggagtatatcgagcgtatgggcatcgacaatgataccgaactgagcaaacaaattttccgtgtggataaaaacttctgtctgcgccctatgctggcaccaaatctgtataactatctgcgcaaactggaccgtgccctgcctgatcctatcaaaatcttcgagatcggcccgtgttatcgtaaagagtccgacggtaaagaacatctggaggagtttaccatgctggcctttgcccaaatgggttcaggttgtactcgtgagaacctggaaagcatcatcaccgattttctgaaccacctgggcattgacttcaaaattgtgggcgacagctgtatggtgtatggcgacaccctggatgtcatgcacggcgacctggaactgtctagtgccgttgttggaccaattccgctggaccgtgagtggggtatcgacaaaccgtggatcggagcaggattcggtctggaacgcctgctgaaagtgaaacacgacttcaaaaacatcaaacgtgccgcccgttctgaatcgtattataacgggatctctacgaacctgtaa

SEQ ID NO: 80 - protein, 1396 aa, Artificial Sequence
  Description of Artificial Sequence: Synthetic polypeptide
  KIF13A-FUS-PylRS AA
MSDTKVKVAVRVRPMNRRELELNTKCVVEMEGNQTVLHPPPSNTKQGERKPPKVFAFDYCFWSMDESNTTKYAGQEVVFKCLGEGILEKAFQGYNACIFAYGQTGSGKSFSMMGHAEQLGLIPRLCCALFKRISLEQNESQTFKVEVSYMEIYNEKVRDLLDPKGSRQSLKVREHKVLGPYVDGLSQLAVTSFEDIESLMSEGNKSRTVAATNMNEESSRSHAVFNIIITQTLYDLQSGNSGEKVSKVSLVDLAGSERVSKTGAAGERLKEGSNINKSLTTLGLVISSLADQAAGKGKSKFVPYRDSVLTWLLKDNLGGNSQTSMIATISPAADNYEETLSTLRYADRAKRIVNHAVVNEDPNAKVIRELREEVEKLREQLSQAEAMKAELKEKLEESEKLIKELTVTWEYTDIEMNRLGKGAPGSAGSAAGSGMASNDYTQQATQSYGAYPTQPGQGYSQQSSQPYGQQSYSGYSQSTDTSGYGQSSYSSYGQSQNTGYGTQSTPQGYGSTGGYGSSQSSQSSYGQQSSYPGYGQQPAPSSTSGSYGSSSQSSSYGQPQSGSYSQQPSYGGQQQSYGQQQSYNPPQGYGQQNQYNSSSGGGGGGGGGGNYGQDQSSMSSGGGSGGGYGNQDQSGGGGSGGYGQQDRGGRGRGGSGGGGGGGGGGYNRSSGGYEPRGRGGGRGGRGGMGGSDRGGFNKFGGPRDQGSRHDSEQDNSDNNTIFVQGLGENVTIESVADYFKQIGIIKTNKKTGQPMINLYTDRETGKLKGEATVSFDDPPSAKAAIDWFDGKEFSGNPIKVSFATRRADFNRGGGNGRGGRGRGGPMGRGGYGGGGSGGGGRGGFPSGGGGGGGQQRAGDWKCPNPTCENMNFSWRNECNQCKAPKPDGPGGGPGGSHMGGNYGDDRRGGRGGGAPGSAGSAAGSGMACPVPLQLPPLERLTLDDKKPLNTLISATGLWMSRTGTIHKIKHHEVSRSKIYIEMACGDHLVVNNSRSSRTARALRHHKYRKTCKRCRVSDEDLNKFLTKANEDQTSVKVKVVSAPTRTKKAMPKSVARAPKPLENTEAAQAQPSGSKFSPAIPVSTQESVSVPASVSTSISSISTGATASALVKGNTNPITSMSAPVQASAPALTKSQTDRLEVLLNPKDEISLNSGKPFRELESELLSRRKKDLQQIYAEERENYLGKLEREITRFFVDRGFLEIKSPILIPLEYIERMGIDNDTELSKQIFRVDKNFCLRPMLAPNLYNYLRKLDRALPDPIKIFEIGPCYRKESDGKEHLEEFTMLAFAQMGSGCTRENLESIITDFLNHLGIDFKIVGDSCMVYGDTLDVMHGDLELSSAVVGPIPLDREWGIDKPWIGAGFGLERLLKVKHDFKNIKRAARSESYYNGISTNL

SEQ ID NO: 81 - DNA, 4218 bp, Artificial Sequence
  Description of Artificial Sequence: Synthetic polynucleotide
  KIF13A-FUS-PylRS AAAF
  CDS (1)..(4218)
atgtcggataccaaggtaaaagttgccgtccgggtccggcccatgaaccgacgagaactggaactgaacaccaagtgcgtggtggagatggaagggaatcaaacggtcctgcaccctcctccttctaacaccaaacagggagaaaggaaacctcccaaggtatttgcctttgattattgcttttggtccatggatgaatctaacactacaaaatacgctggtcaagaagtggttttcaagtgccttggggaaggaattcttgaaaaagcctttcaggggtataatgcgtgtatttttgcatatggacagacaggttcgggaaaatccttttccatgatgggccatgctgagcagctgggccttattccaaggctctgctgtgctttatttaaaaggatctctttggagcaaaatgagtcacagacctttaaagttgaagtgtcctatatggaaatttataatgagaaagttcgggatcttttagaccccaaagggagtagacagtctcttaaagttcgagaacataaagttttgggaccatatgtagatggtttatctcaactagctgtcactagttttgaggatattgagtcattgatgtctgagggaaataagtctcgaacggtagctgctaccaacatgaacgaagaaagcagccgctcccatgctgtgttcaacatcataatcacacagacactttatgacctgcagtctgggaattccggggagaaagtcagtaaggtcagcttggtagacctggcgggtagcgaaagagtatctaaaacaggagctgcaggagagcgactgaaagaaggcagcaacattaacaaatcgcttacaaccttggggttggttatatcatcactggctgaccaggcagctggcaagggtaaaagcaaatttgtgccttatcgagattcagtcctcacttggctgcttaaggacaacttggggggcaacagccaaacctctatgatagccacaatcagcccagccgcagacaactatgaagagaccctctccacattaagatatgcagaccgagccaaaaggattgtgaaccatgctgttgtgaatgaggaccccaacgcaaaagtgatccgagaactgcgggaggaagtcgagaaactgagagagcagctctctcaggcagaggccatgaaggccgaactgaaggagaagctcgaagagtctgaaaagctgataaaagaactaacagtgacttgggaatatacagatattgaaatgaacagattgggaaagggcgcccccggctccgccggctccgccgccggctccggcatggcctcaaacgattatacccaacaagcaacccaaagctatggggcctaccccacccagcccgggcagggctattcccagcagagcagtcagccctacggacagcagagttacagtggttatagccagtccacggacacttcaggatatggccagagcagctattcttcttatggccagagccagaacacaggctatggaactcagtcaactccccagggatatggctcgactggcggctatggcagtagccagagctcccaatcgtcttacgggcagcagtcctcctaccctggctatggccagcagccagctcccagcagcacctcgggaagttacggtagcagttctcagagcagcagctatgggcagccccagagtgggagctacagccagcagcctagctatggtggacagcagcaaagctatggacagcagcaaagctataatccccctcagggctatggacagcagaaccagtacaacagcagcagtggtggtggaggtggaggtggaggtggaggtaactatggccaagatcaatcctccatgagtagtggtggtggcagtggtggcggttatggcaatcaagaccagagtggtggaggtggcagcggtggctatggacagcaggaccgtggaggccgcggcaggggtggcagtggtggcggcggcggcggcggcggtggtggttacaaccgcagcagtggtggctatgaacccagaggtcgtggaggtggccgtggaggcagaggtggcatgggcggaagtgaccgtggtggcttcaataaatttggtggccctcgggaccaaggatcacgtcatgactccgaacaggataattcagacaacaacaccatctttgtgcaaggcctgggtgagaatgttacaattgagtctgtggctgattacttcaagcagattggtattattaagacaaacaagaaaacgggacagcccatgattaatttgtacacagacagggaaactggcaagctgaagggagaggcaacggtctcttttgatgacccaccttcagctaaagcagctattgactggtttgatggtaaagaattctccggaaatcctatcaaggtctcatttgctactcgccgggcagactttaatcggggtggtggcaatggtcgtggaggccgagggcgaggaggacccatgggccgtggaggctatggaggtggtggcagtggtggtggtggccgaggaggatttcccagtggaggtggtggcggtggaggacagcagcgagctggtgactggaagtgtcctaatcccacctgtgagaatatgaacttctcttggaggaatgaatgcaaccagtgtaaggcccctaaaccagatggcccaggagggggaccaggtggctctcacatggggggtaactacggggatgatcgtcgtggtggcagaggaggcgattacaaggatgacgacgataagggtaccggcgcccccggctccgccggctccgccgccggctccggcgcgtgcccggtgccgctgcagctgccgccgctggaacgcctgaccctggatgataaaaaaccgctgaataccctgatctctgctactggtctgtggatgagtcgtaccggaaccattcataaaatcaaacaccacgaggttagccgttcgaaaatctatattgagatggcgtgtggcgatcatctggttgtgaacaatagccgctcttctcgtacagcacgtgcactgcgtcaccacaaatatcgtaaaacctgtaaacgttgccgtgtgtccgatgaggatctgaacaaattcctgacaaaagccaatgaggaccaaacaagcgtgaaagtgaaagtcgttagcgctcctacccgtactaaaaaagcaatgccgaaatccgttgctcgtgcccctaaaccactggaaaacactgaagcagcacaggcacagccgtctggaagcaaattctctccggccattcctgtttctacccaggagtccgtttctgttccagcaagtgtgagcaccagcattagcagtattagcaccggtgccaccgctagcgccctggttaaaggcaataccaatccgattacaagcatgtctgccccggttcaagcatcagctccagcactgacaaaatcccaaaccgatcgtctggaggttctgctgaatccgaaagacgaaatcagcctgaattccggcaaaccgtttcgtgaactggagagcgaactgctgtcacgtcgtaaaaaagacctgcaacaaatctatgccgaagaacgtgagaactatctggggaaactggaacgtgaaatcacccgctttttcgtggatcgtggctttctggagatcaaatccccgattctgattcctctggagtatatcgagcgtatgggcatcgacaatgataccgaactgagcaaacaaattttccgtgtggataaaaacttctgtctgcgccctatgctagcaccaaatctggctaactatctgcgcaaactggaccgtgccctgcctgatcctatcaaaatcttcgagatcggcccgtgttatcgtaaagagtccgacggtaaagaacatctggaggagtttaccatgctggcctttgcccaaatgggttcaggttgtactcgtgagaacctggaaagcatcatcaccgattttctgaaccacctgggcattgacttcaaaattgtgggcgacagctgtatggtgtttggcgacaccctggatgtcatgcacggcgacctggaactgtctagtgccgttgtgggcccaatcccgctggatcgtgagtggggtatcgacaaaccttggatcggtgcgggttttggtctggagcgtctgctgaaagtaaaacacgacttcaagaacatcaaacgtgctgcacgttccgagtcctattacaatggtatttctactaacctgtaa

SEQ ID NO: 82 - protein, 1405 aa, Artificial Sequence
  Description of Artificial Sequence: Synthetic polypeptide
  KIF13A-FUS-PylRS AAAF
MSDTKVKVAVRVRPMNRRELELNTKCVVEMEGNQTVLHPPPSNTKQGERKPPKVFAFDYCFWSMDESNTTKYAGQEVVFKCLGEGILEKAFQGYNACIFAYGQTGSGKSFSMMGHAEQLGLIPRLCCALFKRISLEQNESQTFKVEVSYMEIYNEKVRDLLDPKGSRQSLKVREHKVLGPYVDGLSQLAVTSFEDIESLMSEGNKSRTVAATNMNEESSRSHAVFNIIITQTLYDLQSGNSGEKVSKVSLVDLAGSERVSKTGAAGERLKEGSNINKSLTTLGLVISSLADQAAGKGKSKFVPYRDSVLTWLLKDNLGGNSQTSMIATISPAADNYEETLSTLRYADRAKRIVNHAVVNEDPNAKVIRELREEVEKLREQLSQAEAMKAELKEKLEESEKLIKELTVTWEYTDIEMNRLGKGAPGSAGSAAGSGMASNDYTQQATQSYGAYPTQPGQGYSQQSSQPYGQQSYSGYSQSTDTSGYGQSSYSSYGQSQNTGYGTQSTPQGYGSTGGYGSSQSSQSSYGQQSSYPGYGQQPAPSSTSGSYGSSSQSSSYGQPQSGSYSQQPSYGGQQQSYGQQQSYNPPQGYGQQNQYNSSSGGGGGGGGGGNYGQDQSSMSSGGGSGGGYGNQDQSGGGGSGGYGQQDRGGRGRGGSGGGGGGGGGGYNRSSGGYEPRGRGGGRGGRGGMGGSDRGGFNKFGGPRDQGSRHDSEQDNSDNNTIFVQGLGENVTIESVADYFKQIGIIKTNKKTGQPMINLYTDRETGKLKGEATVSFDDPPSAKAAIDWFDGKEFSGNPIKVSFATRRADFNRGGGNGRGGRGRGGPMGRGGYGGGGSGGGGRGGFPSGGGGGGGQQRAGDWKCPNPTCENMNFSWRNECNQCKAPKPDGPGGGPGGSHMGGNYGDDRRGGRGGDYKDDDDKGTGAPGSAGSAAGSGACPVPLQLPPLERLTLDDKKPLNTLISATGLWMSRTGTIHKIKHHEVSRSKIYIEMACGDHLVVNNSRSSRTARALRHHKYRKTCKRCRVSDEDLNKFLTKANEDQTSVKVKVVSAPTRTKKAMPKSVARAPKPLENTEAAQAQPSGSKFSPAIPVSTQESVSVPASVSTSISSISTGATASALVKGNTNPITSMSAPVQASAPALTKSQTDRLEVLLNPKDEISLNSGKPFRELESELLSRRKKDLQQIYAEERENYLGKLEREITRFFVDRGFLEIKSPILIPLEYIERMGIDNDTELSKQIFRVDKNFCLRPMLAPNLANYLRKLDRALPDPIKIFEIGPCYRKESDGKEHLEEFTMLAFAQMGSGCTRENLESIITDFLNHLGIDFKIVGDSCMVFGDTLDVMHGDLELSSAVVGPIPLDREWGIDKPWIGAGFGLERLLKVKHDFKNIKRAARSESYYNGISTNL

SEQ ID NO: 83 - DNA, 3564 bp, Artificial Sequence
  Description of Artificial Sequence: Synthetic polynucleotide
  KIF13A-EWSR1-MCP
  CDS (1)..(3564)
atgtcggataccaaggtaaaagttgccgtccgggtccggcccatgaaccgacgagaactggaactgaacaccaagtgcgtggtggagatggaagggaatcaaacggtcctgcaccctcctccttctaacaccaaacagggagaaaggaaacctcccaaggtatttgcctttgattattgcttttggtccatggatgaatctaacactacaaaatacgctggtcaagaagtggttttcaagtgccttggggaaggaattcttgaaaaagcctttcaggggtataatgcgtgtatttttgcatatggacagacaggttcgggaaaatccttttccatgatgggccatgctgagcagctgggccttattccaaggctctgctgtgctttatttaaaaggatctctttggagcaaaatgagtcacagacctttaaagttgaagtgtcctatatggaaatttataatgagaaagttcgggatcttttagaccccaaagggagtagacagtctcttaaagttcgagaacataaagttttgggaccatatgtagatggtttatctcaactagctgtcactagttttgaggatattgagtcattgatgtctgagggaaataagtctcgaacggtagctgctaccaacatgaacgaagaaagcagccgctcccatgctgtgttcaacatcataatcacacagacactttatgacctgcagtctgggaattccggggagaaagtcagtaaggtcagcttggtagacctggcgggtagcgaaagagtatctaaaacaggagctgcaggagagcgactgaaagaaggcagcaacattaacaaatcgcttacaaccttggggttggttatatcatcactggctgaccaggcagctggcaagggtaaaagcaaatttgtgccttatcgagattcagtcctcacttggctgcttaaggacaacttggggggcaacagccaaacctctatgatagccacaatcagcccagccgcagacaactatgaagagaccctctccacattaagatatgcagaccgagccaaaaggattgtgaaccatgctgttgtgaatgaggaccccaacgcaaaagtgatccgagaactgcgggaggaagtcgagaaactgagagagcagctctctcaggcagaggccatgaaggccgaactgaaggagaagctcgaagagtctgaaaagctgataaaagaactaacagtgacttgggaaatggcgtccacggattacagtacctatagccaagctgcagcgcagcagggctacagtgcttacaccgcccagcccactcaaggatatgcacagaccacccaggcatatgggcaacaaagctatggaacctatggacagcccactgatgtcagctatacccaggctcagaccactgcaacctatgggcagaccgcctatgcaacttcttatggacagcctcccactggttatactactccaactgccccccaggcatacagccagcctgtccaggggtatggcactggtgcttatgataccaccactgctacagtcaccaccacccaggcctcctatgcagctcagtctgcatatggcactcagcctgcttatccagcctatgggcagcagccagcagccactgcacctacaagaccgcaggatggaaacaagcccactgagactagtcaacctcaatctagcacagggggttacaaccagcccagcctaggatatggacagagtaactacagttatccccaggtacctgggagctaccccatgcagccagtcactgcacctccatcctaccctcctaccagctattcctctacacagccgactagttatgatcagagcagttactctcagcagaacacctatgggcaaccgagcagctatggacagcagagtagctatggtcaacaaagcagctatgggcagcagcctcccactagttacccaccccaaactggatcctacagccaagctccaagtcaatatagccaacagagcagcagctacgggcagcagagttcattccgacaggaccaccccagtagcatgggtgtttatgggcaggagtctggaggattttccggaccaggagagaaccggagcatgagtggccctgataaccggggcaggggaagagggggatttgatcgtggaggcatgagcagaggtgggcggggaggaggacgcggtggaatgggcagcgctggagagcgaggtggcttcaataagcctggtggacccatggatgaaggaccagatcttgatctaggcccacctgtagatccagatgaagactctgacaacagtgcaatttatgtacaaggattaaatgacagtgtgactctagatgatctggcagacttctttaagcagtgtggggttgttaagatgaacaagagaactgggcaacccatgatccacatctacctggacaaggaaacaggaaagcccaaaggcgatgccacagtgtcctatgaagacccacctactgccaaggctgccgtggaatggtttgatgggaaagattttcaagggagcaaacttaaagtctcccttgctcggaagaagcctccaatgaacagtatgcggggtggtctgccaccccgtgagggcagaggcatgccaccaccactccgtggaggtccaggaggcccaggaggtcctgggggacccatgggtcgcatgggaggccgtggaggagatagaggaggcttccctccaagaggaccccggggttcccgagggaacccctctggaggaggaaacgtccagcaccgagctggagactggcagtgtcccaatccgggttgtggaaaccagaacttcgcctggagaacagagtgcaaccagtgtaaggccccaaagcctgaaggcttcctcccgccaccctttccgcccccgggtggtgatcgtggcagaggtggccctggtggcatgcggggaggaagaggtggcctcatggatcgtggtggtcccggtggaatgttcagaggtggccgtggtggagacagaggtggcttccgtggtggccggggcatggaccgaggtggctttggtggaggaagacgaggtggccctggggggccccctggacctttgatggaacaggattacaaggatgacgacgataagggtaccgagcagaagctgatctcagaggaggacctgggcgcccccggctccgccggctccgccgccggctccggcgcttctaactttactcagttcgttctcgtcgacaatggcggaactggcgacgtgactgtcgccccaagcaacttcgctaacgggatcgctgaatggatcagctctaactcgcgttcacaggcttacaaagtaacctgtagcgttcgtcagagctctgcgcagaatcgcaaatacaccatcaaagtcgaggtgcctaaaggcgcctggcgttcgtacttaaatatggaactaaccattccaattttcgccacgaattccgactgcgagcttattgttaaggcaatgcaaggtctcctaaaagatggaaacccgattccctcagcaatcgcagcaaactccggcatctactaa

SEQ ID NO: 84 - protein, 1187 aa, Artificial Sequence
  Description of Artificial Sequence: Synthetic polypeptide
  KIF13A-EWSR1-MCP
MSDTKVKVAVRVRPMNRRELELNTKCVVEMEGNQTVLHPPPSNTKQGERKPPKVFAFDYCFWSMDESNTTKYAGQEVVFKCLGEGILEKAFQGYNACIFAYGQTGSGKSFSMMGHAEQLGLIPRLCCALFKRISLEQNESQTFKVEVSYMEIYNEKVRDLLDPKGSRQSLKVREHKVLGPYVDGLSQLAVTSFEDIESLMSEGNKSRTVAATNMNEESSRSHAVFNIIITQTLYDLQSGNSGEKVSKVSLVDLAGSERVSKTGAAGERLKEGSNINKSLTTLGLVISSLADQAAGKGKSKFVPYRDSVLTWLLKDNLGGNSQTSMIATISPAADNYEETLSTLRYADRAKRIVNHAVVNEDPNAKVIRELREEVEKLREQLSQAEAMKAELKEKLEESEKLIKELTVTWEMASTDYSTYSQAAAQQGYSAYTAQPTQGYAQTTQAYGQQSYGTYGQPTDVSYTQAQTTATYGQTAYATSYGQPPTGYTTPTAPQAYSQPVQGYGTGAYDTTTATVTTTQASYAAQSAYGTQPAYPAYGQQPAATAPTRPQDGNKPTETSQPQSSTGGYNQPSLGYGQSNYSYPQVPGSYPMQPVTAPPSYPPTSYSSTQPTSYDQSSYSQQNTYGQPSSYGQQSSYGQQSSYGQQPPTSYPPQTGSYSQAPSQYSQQSSSYGQQSSFRQDHPSSMGVYGQESGGFSGPGENRSMSGPDNRGRGRGGFDRGGMSRGGRGGGRGGMGSAGERGGFNKPGGPMDEGPDLDLGPPVDPDEDSDNSAIYVQGLNDSVTLDDLADFFKQCGVVKMNKRTGQPMIHIYLDKETGKPKGDATVSYEDPPTAKAAVEWFDGKDFQGSKLKVSLARKKPPMNSMRGGLPPREGRGMPPPLRGGPGGPGGPGGPMGRMGGRGGDRGGFPPRGPRGSRGNPSGGGNVQHRAGDWQCPNPGCGNQNFAWRTECNQCKAPKPEGFLPPPFPPPGGDRGRGGPGGMRGGRGGLMDRGGPGGMFRGGRGGDRGGFRGGRGMDRGGFGGGRRGGPGGPPGPLMEQDYKDDDDKGTEQKLISEEDLGAPGSAGSAAGSGASNFTQFVLVDNGGTGDVTVAPSNFANGIAEWISSNSRSQAYKVTCSVRQSSAQNRKYTIKVEVPKGAWRSYLNMELTIPIFATNSDCELIVKAMQGLLKDGNPIPSAIAANSGIY

SEQ ID NO: 85 - DNA, 6282 bp, Artificial Sequence
  Description of Artificial Sequence: Synthetic polynucleotide
  KIF13A-SPD5-PylRS AF
  CDS (1)..(6282)
atgtcggataccaaggtaaaagttgccgtccgggtccggcccatgaaccgacgagaactggaactgaacaccaagtgcgtggtggagatggaagggaatcaaacggtcctgcaccctcctccttctaacaccaaacagggagaaaggaaacctcccaaggtatttgcctttgattattgcttttggtccatggatgaatctaacactacaaaatacgctggtcaagaagtggttttcaagtgccttggggaaggaattcttgaaaaagcctttcaggggtataatgcgtgtatttttgcatatggacagacaggttcgggaaaatccttttccatgatgggccatgctgagcagctgggccttattccaaggctctgctgtgctttatttaaaaggatctctttggagcaaaatgagtcacagacctttaaagttgaagtgtcctatatggaaatttataatgagaaagttcgggatcttttagaccccaaagggagtagacagtctcttaaagttcgagaacataaagttttgggaccatatgtagatggtttatctcaactagctgtcactagttttgaggatattgagtcattgatgtctgagggaaataagtctcgaacggtagctgctaccaacatgaacgaagaaagcagccgctcccatgctgtgttcaacatcataatcacacagacactttatgacctgcagtctgggaattccggggagaaagtcagtaaggtcagcttggtagacctggcgggtagcgaaagagtatctaaaacaggagctgcaggagagcgactgaaagaaggcagcaacattaacaaatcgcttacaaccttggggttggttatatcatcactggctgaccaggcagctggcaagggtaaaagcaaatttgtgccttatcgagattcagtcctcacttggctgcttaaggacaacttggggggcaacagccaaacctctatgatagccacaatcagcccagccgcagacaactatgaagagaccctctccacattaagatatgcagaccgagccaaaaggattgtgaaccatgctgttgtgaatgaggaccccaacgcaaaagtgatccgagaactgcgggaggaagtcgagaaactgagagagcagctctctcaggcagaggccatgaaggccgaactgaaggagaagctcgaagagtctgaaaagctgataaaagaactaacagtgacttgggaaatggaggacaacagcgtgctgaacgaggacagcaacctggagcacgtggagggccagcccagaagaagcatgagccagcccgtgctgaacgtggagggcgacaagagaaccagcagcaccagcgccacccagcagcaggtgctgagcggcgccttcagcagcgccgacgtgagaagcatccccatcatccagacctgggaggagaacaaggccctgaagaccaagatcaccatcctgagaggcgagctgcagatgtaccagagaagatacagcgaggccaaggaggccagccagaagagagtgaaggaggtgatggacgactacgtggacctgaagctgggccaggagaacgtgcaggagaagatggagcagtacaagctgatggaggaggacctgctggccatgcagagcagaatcgagaccagcgaggacaacttcgccagacagatgaaggagttcgaggcccagaagcacgccatggaggagagaatcaaggagctggagctgagcgccaccgacgccaacaacaccaccgtgggcagcttcagaggcaccctggacgacatcctgaagaagaacgaccccgacttcaccctgaccagcggctacgaggagagaaagatcaacgacctggaggccaagctgctgagcgagatcgacaaggtggccgagctggaggaccacatccagcagctgagacaggagctggacgaccagagcgccagactggccgacagcgagaacgtgagagcccagctggaggccgccaccggccagggcatcctgggcgccgccggcaacgccatggtgcccaacagcaccttcatgatcggcaacggcagagagagccagaccagagaccagctgaactacatcgacgacctggagaccaagctggccgacgccaagaaggagaacgacaaggccagacaggccctggtggagtacatgaacaagtgcagcaagctggagcacgagatcagaaccatggtgaagaacagcaccttcgacagcagcagcatgctgctgggcggccagaccagcgacgagctgaagatccagatcggcaaggtgaacggcgagctgaacgtgctgagagccgagaacagagagctgagaatcagatgcgaccagctgaccggcggcgacggcaacctgagcatcagcctgggccagagcagactgatggccggcatcgccaccaacgacgtggacagcatcggccagggcaacgagaccggcggcaccagcatgagaatcctgcccagagagagccagctggacgacctggaggagagcaagctgcccctgatggacaccagcagcgccgtgagaaaccagcagcagttcgccagcatgtgggaggacttcgagagcgtgaaggacagcctgcagaacaaccacaacgacaccctggagggcagcttcaacagcagcatgcccccccccggcagagacgccacccagagcttcctgagccagaagagcttcaagaacagccccatcgtgatgcagaagcccaagagcctgcacctgcacctgaagagccaccagagcgagggcgccggcgagcagatccagaacaacagcttcagcaccaagaccgccagcccccacgtgagccagagccacatccccatcctgcacgacatgcagcagatcctggacagcagcgccatgttcctggagggccagcacgacgtggccgtgaacgtggagcagatgcaggagaagatgagccagatcagagaggccctggccagactgttcgagagactgaagagcagcgccgccctgttcgaggagatcctggagagaatgggcagcagcgaccccaacgccgacaagatcaagaagatgaagctggccttcgagaccagcatcaacgacaagctgaacgtgagcgccatcctggaggccgccgagaaggacctgcacaacatgagcctgaacttcagcatcctggagaagagcatcgtgagccaggccgccgaggccagcagaagattcaccatcgcccccgacgccgaggacgtggccagcagcagcctgctgaacgccagctacagccccctgttcaagttcaccagcaacagcgacatcgtggagaagctgcagaacgaggtgagcgagctgaagaacgagctggagatggccagaaccagagacatgagaagccccctgaacggcagcagcggcagactgagcgacgtgcagatcaacaccaacagaatgttcgaggacctggaggtgagcgaggccaccctgcagaaggccaaggaggagaacagcaccctgaagagccagttcgccgagctggaggccaacctgcaccaggtgaacagcaagctgggcgaggtgagatgcgagctgaacgaggccctggccagagtggacggcgagcaggagaccagagtgaaggccgagaacgccctggaggaggccagacagctgatcagcagcctgaagcacgaggagaacgagctgaagaagaccatcaccgacatgggcatgagactgaacgaggccaagaagagcgacgagttcctgaagagcgagctgagcaccgccctggaggaggagaagaagagccagaacctggccgacgagctgagcgaggagctgaacggctggagaatgagaaccaaggaggccgagaacaaggtggagcacgccagcagcgagaagagcgagatgctggagagaatcgtgcacctggagaccgagatggagaagctgagcaccagcgagatcgccgccgactactgcagcaccaagatgaccgagagaaagaaggagatcgagctggccaagtacagagaggacttcgagaacgccgccatcgtgggcctggagagaatcagcaaggagatcagcgagctgaccaagaagaccctgaaggccaagatcatccccagcaacatcagcagcatccagctggtgtgcgacgagctgtgcagaagactgagcagagagagagagcagcagcacgagtacgccaaggtgatgagagacgtgaacgagaagatcgagaagctgcagctggagaaggacgccctggagcacgagctgaagatgatgagcagcaacaacgagaacgtgccccccgtgggcaccagcgtgagcggcatgcccaccaagaccagcaaccagaagtgcgcccagccccactacaccagccccaccagacagctgctgcacgagagcaccatggccgtggacgccatcgtgcagaagctgaagaagacccacaacatgagcggcatgggccccgagctgaaggagaccatcggcaacgtgatcaacgagagcagagtgctgagagacttcctgcaccagaagctgatcctgttcaagggcatcgacatgagcaactggaagaacgagaccgtggaccagctgatcaccgacctgggccagctgcaccaggacaacctgatgctggaggagcagatcaagaagtacaagaaggagctgaagctgaccaagagcgccatccccaccctgggcgtggagttccaggacagaatcaagaccgagatcggcaagatcgccaccgacatgggcggcgccgtgaaggagatcagaaagaagggtaccggcgcccccggctccgccggctccgccgccggctccggcgcgtgcccggtgccgctgcagctgccgccgctggaacgcctgaccctggatgataaaaaaccgctgaataccctgatctctgctactggtctgtggatgagtcgtaccggaaccattcataaaatcaaacaccacgaggttagccgttcgaaaatctatattgagatggcgtgtggcgatcatctggttgtgaacaatagccgctcttctcgtacagcacgtgcactgcgtcaccacaaatatcgtaaaacctgtaaacgttgccgtgtgtccgatgaggatctgaacaaattcctgacaaaagccaatgaggaccaaacaagcgtgaaagtgaaagtcgttagcgctcctacccgtactaaaaaagcaatgccgaaatccgttgctcgtgcccctaaaccactggaaaacactgaagcagcacaggcacagccgtctggaagcaaattctctccggccattcctgtttctacccaggagtccgtttctgttccagcaagtgtgagcaccagcattagcagtattagcaccggtgccaccgctagcgccctggttaaaggcaataccaatccgattacaagcatgtctgccccggttcaagcatcagctccagcactgacaaaatcccaaaccgatcgtctggaggttctgctgaatccgaaagacgaaatcagcctgaattccggcaaaccgtttcgtgaactggagagcgaactgctgtcacgtcgtaaaaaagacctgcaacaaatctatgccgaagaacgtgagaactatctggggaaactggaacgtgaaatcacccgctttttcgtggatcgtggctttctggagatcaaatccccgattctgattcctctggagtatatcgagcgtatgggcatcgacaatgataccgaactgagcaaacaaattttccgtgtggataaaaacttctgtctgcgccctatgctagcaccaaatctggctaactatctgcgcaaactggaccgtgccctgcctgatcctatcaaaatcttcgagatcggcccgtgttatcgtaaagagtccgacggtaaagaacatctggaggagtttaccatgctgaacttttgccaaatgggttcaggttgtactcgtgagaacctggaaagcatcatcaccgattttctgaaccacctgggcattgacttcaaaattgtgggcgacagctgtatggtgtttggcgacaccctggatgtcatgcacggcgacctggaactgtctagtgccgttgtgggcccaatcccgctggatcgtgagtggggtatcgacaaaccttggatcggtgcgggttttggtctggagcgtctgctgaaagtaaaacacgacttcaagaacatcaaacgtgctgcacgttccgagtcctattacaatggtatttctactaacctgtaa

SEQ ID NO: 86 - protein, 2093 aa, Artificial Sequence
  Description of Artificial Sequence: Synthetic polypeptide
  KIF13A-SPD5-PylRS AF
MSDTKVKVAVRVRPMNRRELELNTKCVVEMEGNQTVLHPPPSNTKQGERKPPKVFAFDYCFWSMDESNTTKYAGQEVVFKCLGEGILEKAFQGYNACIFAYGQTGSGKSFSMMGHAEQLGLIPRLCCALFKRISLEQNESQTFKVEVSYMEIYNEKVRDLLDPKGSRQSLKVREHKVLGPYVDGLSQLAVTSFEDIESLMSEGNKSRTVAATNMNEESSRSHAVFNIIITQTLYDLQSGNSGEKVSKVSLVDLAGSERVSKTGAAGERLKEGSNINKSLTTLGLVISSLADQAAGKGKSKFVPYRDSVLTWLLKDNLGGNSQTSMIATISPAADNYEETLSTLRYADRAKRIVNHAVVNEDPNAKVIRELREEVEKLREQLSQAEAMKAELKEKLEESEKLIKELTVTWEMEDNSVLNEDSNLEHVEGQPRRSMSQPVLNVEGDKRTSSTSATQQQVLSGAFSSADVRSIPIIQTWEENKALKTKITILRGELQMYQRRYSEAKEASQKRVKEVMDDYVDLKLGQENVQEKMEQYKLMEEDLLAMQSRIETSEDNFARQMKEFEAQKHAMEERIKELELSATDANNTTVGSFRGTLDDILKKNDPDFTLTSGYEERKINDLEAKLLSEIDKVAELEDHIQQLRQELDDQSARLADSENVRAQLEAATGQGILGAAGNAMVPNSTFMIGNGRESQTRDQLNYIDDLETKLADAKKENDKARQALVEYMNKCSKLEHEIRTMVKNSTFDSSSMLLGGQTSDELKIQIGKVNGELNVLRAENRELRIRCDQLTGGDGNLSISLGQSRLMAGIATNDVDSIGQGNETGGTSMRILPRESQLDDLEESKLPLMDTSSAVRNQQQFASMWEDFESVKDSLQNNHNDTLEGSFNSSMPPPGRDATQSFLSQKSFKNSPIVMQKPKSLHLHLKSHQSEGAGEQIQNNSFSTKTASPHVSQSHIPILHDMQQILDSSAMFLEGQHDVAVNVEQMQEKMSQIREALARLFERLKSSAALFEEILERMGSSDPNADKIKKMKLAFETSINDKLNVSAILEAAEKDLHNMSLNFSILEKSIVSQAAEASRRFTIAPDAEDVASSSLLNASYSPLFKFTSNSDIVEKLQNEVSELKNELEMARTRDMRSPLNGSSGRLSDVQINTNRMFEDLEVSEATLQKAKEENSTLKSQFAELEANLHQVNSKLGEVRCELNEALARVDGEQETRVKAENALEEARQLISSLKHEENELKKTITDMGMRLNEAKKSDEFLKSELSTALEEEKKSQNLADELSEELNGWRMRTKEAENKVEHASSEKSEMLERIVHLETEMEKLSTSEIAADYCSTKMTERKKEIELAKYREDFENAAIVGLERISKEISELTKKTLKAKIIPSNISSIQLVCDELCRRLSREREQQHEYAKVMRDVNEKIEKLQLEKDALEHELKMMSSNNENVPPVGTSVSGMPTKTSNQKCAQPHYTSPTRQLLHESTMAVDAIVQKLKKTHNMSGMGPELKETIGNVINESRVLRDFLHQKLILFKGIDMSNWKNETVDQLITDLGQLHQDNLMLEEQIKKYKKELKLTKSAIPTLGVEFQDRIKTEIGKIATDMGGAVKEIRKKGTGAPGSAGSAAGSGACPVPLQLPPLERLTLDDKKPLNTLISATGLWMSRTGTIHKIKHHEVSRSKIYIEMACGDHLVVNNSRSSRTARALRHHKYRKTCKRCRVSDEDLNKFLTKANEDQTSVKVKVVSAPTRTKKAMPKSVARAPKPLENTEAAQAQPSGSKFSPAIPVSTQESVSVPASVSTSISSISTGATASALVKGNTNPITSMSAPVQASAPALTKSQTDRLEVLLNPKDEISLNSGKPFRELESELLSRRKKDLQQIYAEERENYLGKLEREITRFFVDRGFLEIKSPILIPLEYIERMGIDNDTELSKQIFRVDKNFCLRPMLAPNLANYLRKLDRALPDPIKIFEIGPCYRKESDGKEHLEEFTMLNFCQMGSGCTRENLESIITDFLNHLGIDFKIVGDSCMVFGDTLDVMHGDLELSSAVVGPIPLDREWGIDKPWIGAGFGLERLLKVKHDFKNIKRAARSESYYNGISTNL

SEQ ID NO: 87 - DNA, 5250 bp, Artificial Sequence
  Description of Artificial Sequence: Synthetic polynucleotide
  KIF13A-SPD5-MCP
  CDS (1)..(5250)
atgtcggataccaaggtaaaagttgccgtccgggtccggcccatgaaccgacgagaactggaactgaacaccaagtgcgtggtggagatggaagggaatcaaacggtcctgcaccctcctccttctaacaccaaacagggagaaaggaaacctcccaaggtatttgcctttgattattgcttttggtccatggatgaatctaacactacaaaatacgctggtcaagaagtggttttcaagtgccttggggaaggaattcttgaaaaagcctttcaggggtataatgcgtgtatttttgcatatggacagacaggttcgggaaaatccttttccatgatgggccatgctgagcagctgggccttattccaaggctctgctgtgctttatttaaaaggatctctttggagcaaaatgagtcacagacctttaaagttgaagtgtcctatatggaaatttataatgagaaagttcgggatcttttagaccccaaagggagtagacagtctcttaaagttcgagaacataaagttttgggaccatatgtagatggtttatctcaactagctgtcactagttttgaggatattgagtcattgatgtctgagggaaataagtctcgaacggtagctgctaccaacatgaacgaagaaagcagccgctcccatgctgtgttcaacatcataatcacacagacactttatgacctgcagtctgggaattccggggagaaagtcagtaaggtcagcttggtagacctggcgggtagcgaaagagtatctaaaacaggagctgcaggagagcgactgaaagaaggcagcaacattaacaaatcgcttacaaccttggggttggttatatcatcactggctgaccaggcagctggcaagggtaaaagcaaatttgtgccttatcgagattcagtcctcacttggctgcttaaggacaacttggggggcaacagccaaacctctatgatagccacaatcagcccagccgcagacaactatgaagagaccctctccacattaagatatgcagaccgagccaaaaggattgtgaaccatgctgttgtgaatgaggaccccaacgcaaaagtgatccgagaactgcgggaggaagtcgagaaactgagagagcagctctctcaggcagaggccatgaaggccgaactgaaggagaagctcgaagagtctgaaaagctgataaaagaactaacagtgacttgggaaatggaggacaacagcgtgctgaacgaggacagcaacctggagcacgtggagggccagcccagaagaagcatgagccagcccgtgctgaacgtggagggcgacaagagaaccagcagcaccagcgccacccagcagcaggtgctgagcggcgccttcagcagcgccgacgtgagaagcatccccatcatccagacctgggaggagaacaaggccctgaagaccaagatcaccatcctgagaggcgagctgcagatgtaccagagaagatacagcgaggccaaggaggccagccagaagagagtgaaggaggtgatggacgactacgtggacctgaagctgggccaggagaacgtgcaggagaagatggagcagtacaagctgatggaggaggacctgctggccatgcagagcagaatcgagaccagcgaggacaacttcgccagacagatgaaggagttcgaggcccagaagcacgccatggaggagagaatcaaggagctggagctgagcgccaccgacgccaacaacaccaccgtgggcagcttcagaggcaccctggacgacatcctgaagaagaacgaccccgacttcaccctgaccagcggctacgaggagagaaagatcaacgacctggaggccaagctgctgagcgagatcgacaaggtggccgagctggaggaccacatccagcagctgagacaggagctggacgaccagagcgccagactggccgacagcgagaacgtgagagcccagctggaggccgccaccggccagggcatcctgggcgccgccggcaacgccatggtgcccaacagcaccttcatgatcggcaacggcagagagagccagaccagagaccagctgaactacatcgacgacctggagaccaagctggccgacgccaagaaggagaacgacaaggccagacaggccctggtggagtacatgaacaagtgcagcaagctggagcacgagatcagaaccatggtgaagaacagcaccttcgacagcagcagcatgctgctgggcggccagaccagcgacgagctgaagatccagatcggcaaggtgaacggcgagctgaacgtgctgagagccgagaacagagagctgagaatcagatgcgaccagctgaccggcggcgacggcaacctgagcatcagcctgggccagagcagactgatggccggcatcgccaccaacgacgtggacagcatcggccagggcaacgagaccggcggcaccagcatgagaatcctgcccagagagagccagctggacgacctggaggagagcaagctgcccctgatggacaccagcagcgccgtgagaaaccagcagcagttcgccagcatgtgggaggacttcgagagcgtgaaggacagcctgcagaacaaccacaacgacaccctggagggcagcttcaacagcagcatgcccccccccggcagagacgccacccagagcttcctgagccagaagagcttcaagaacagccccatcgtgatgcagaagcccaagagcctgcacctgcacctgaagagccaccagagcgagggcgccggcgagcagatccagaacaacagcttcagcaccaagaccgccagcccccacgtgagccagagccacatccccatcctgcacgacatgcagcagatcctggacagcagcgccatgttcctggagggccagcacgacgtggccgtgaacgtggagcagatgcaggagaagatgagccagatcagagaggccctggccagactgttcgagagactgaagagcagcgccgccctgttcgaggagatcctggagagaatgggcagcagcgaccccaacgccgacaagatcaagaagatgaagctggccttcgagaccagcatcaacgacaagctgaacgtgagcgccatcctggaggccgccgagaaggacctgcacaacatgagcctgaacttcagcatcctggagaagagcatcgtgagccaggccgccgaggccagcagaagattcaccatcgcccccgacgccgaggacgtggccagcagcagcctgctgaacgccagctacagccccctgttcaagttcaccagcaacagcgacatcgtggagaagctgcagaacgaggtgagcgagctgaagaacgagctggagatggccagaaccagagacatgagaagccccctgaacggcagcagcggcagactgagcgacgtgcagatcaacaccaacagaatgttcgaggacctggaggtgagcgaggccaccctgcagaaggccaaggaggagaacagcaccctgaagagccagttcgccgagctggaggccaacctgcaccaggtgaacagcaagctgggcgaggtgagatgcgagctgaacgaggccctggccagagtggacggcgagcaggagaccagagtgaaggccgagaacgccctggaggaggccagacagctgatcagcagcctgaagcacgaggagaacgagctgaagaagaccatcaccgacatgggcatgagactgaacgaggccaagaagagcgacgagttcctgaagagcgagctgagcaccgccctggaggaggagaagaagagccagaacctggccgacgagctgagcgaggagctgaacggctggagaatgagaaccaaggaggccgagaacaaggtggagcacgccagcagcgagaagagcgagatgctggagagaatcgtgcacctggagaccgagatggagaagctgagcaccagcgagatcgccgccgactactgcagcaccaagatgaccgagagaaagaaggagatcgagctggccaagtacagagaggacttcgagaacgccgccatcgtgggcctggagagaatcagcaaggagatcagcgagctgaccaagaagaccctgaaggccaagatcatccccagcaacatcagcagcatccagctggtgtgcgacgagctgtgcagaagactgagcagagagagagagcagcagcacgagtacgccaaggtgatgagagacgtgaacgagaagatcgagaagctgcagctggagaaggacgccctggagcacgagctgaagatgatgagcagcaacaacgagaacgtgccccccgtgggcaccagcgtgagcggcatgcccaccaagaccagcaaccagaagtgcgcccagccccactacaccagccccaccagacagctgctgcacgagagcaccatggccgtggacgccatcgtgcagaagctgaagaagacccacaacatgagcggcatgggccccgagctgaaggagaccatcggcaacgtgatcaacgagagcagagtgctgagagacttcctgcaccagaagctgatcctgttcaagggcatcgacatgagcaactggaagaacgagaccgtggaccagctgatcaccgacctgggccagctgcaccaggacaacctgatgctggaggagcagatcaagaagtacaagaaggagctgaagctgaccaagagcgccatccccaccctgggcgtggagttccaggacagaatcaagaccgagatcggcaagatcgccaccgacatgggcggcgccgtgaaggagatcagaaagaagggtaccgagcagaagctgatctcagaggaggacctgggcgcccccggctccgccggctccgccgccggctccggcgcttctaactttactcagttcgttctcgtcgacaatggcggaactggcgacgtgactgtcgccccaagcaacttcgctaacgggatcgctgaatggatcagctctaactcgcgttcacaggcttacaaagtaacctgtagcgttcgtcagagctctgcgcagaatcgcaaatacaccatcaaagtcgaggtgcctaaaggcgcctggcgttcgtacttaaatatggaactaaccattccaattttcgccacgaattccgactgcgagcttattgttaaggcaatgcaaggtctcctaaaagatggaaacccgattccctcagcaatcgcagcaaactccggcatctactaa

SEQ ID NO: 88 - protein, 1749 aa, Artificial Sequence
  Description of Artificial Sequence: Synthetic polypeptide
  KIF13A-SPD5-MCP
MSDTKVKVAVRVRPMNRRELELNTKCVVEMEGNQTVLHPPPSNTKQGERKPPKVFAFDYCFWSMDESNTTKYAGQEVVFKCLGEGILEKAFQGYNACIFAYGQTGSGKSFSMMGHAEQLGLIPRLCCALFKRISLEQNESQTFKVEVSYMEIYNEKVRDLLDPKGSRQSLKVREHKVLGPYVDGLSQLAVTSFEDIESLMSEGNKSRTVAATNMNEESSRSHAVFNIIITQTLYDLQSGNSGEKVSKVSLVDLAGSERVSKTGAAGERLKEGSNINKSLTTLGLVISSLADQAAGKGKSKFVPYRDSVLTWLLKDNLGGNSQTSMIATISPAADNYEETLSTLRYADRAKRIVNHAVVNEDPNAKVIRELREEVEKLREQLSQAEAMKAELKEKLEESEKLIKELTVTWEMEDNSVLNEDSNLEHVEGQPRRSMSQPVLNVEGDKRTSSTSATQQQVLSGAFSSADVRSIPIIQTWEENKALKTKITILRGELQMYQRRYSEAKEASQKRVKEVMDDYVDLKLGQENVQEKMEQYKLMEEDLLAMQSRIETSEDNFARQMKEFEAQKHAMEERIKELELSATDANNTTVGSFRGTLDDILKKNDPDFTLTSGYEERKINDLEAKLLSEIDKVAELEDHIQQLRQELDDQSARLADSENVRAQLEAATGQGILGAAGNAMVPNSTFMIGNGRESQTRDQLNYIDDLETKLADAKKENDKARQALVEYMNKCSKLEHEIRTMVKNSTFDSSSMLLGGQTSDELKIQIGKVNGELNVLRAENRELRIRCDQLTGGDGNLSISLGQSRLMAGIATNDVDSIGQGNETGGTSMRILPRESQLDDLEESKLPLMDTSSAVRNQQQFASMWEDFESVKDSLQNNHNDTLEGSFNSSMPPPGRDATQSFLSQKSFKNSPIVMQKPKSLHLHLKSHQSEGAGEQIQNNSFSTKTASPHVSQSHIPILHDMQQILDSSAMFLEGQHDVAVNVEQMQEKMSQIREALARLFERLKSSAALFEEILERMGSSDPNADKIKKMKLAFETSINDKLNVSAILEAAEKDLHNMSLNFSILEKSIVSQAAEASRRFTIAPDAEDVASSSLLNASYSPLFKFTSNSDIVEKLQNEVSELKNELEMARTRDMRSPLNGSSGRLSDVQINTNRMFEDLEVSEATLQKAKEENSTLKSQFAELEANLHQVNSKLGEVRCELNEALARVDGEQETRVKAENALEEARQLISSLKHEENELKKTITDMGMRLNEAKKSDEFLKSELSTALEEEKKSQNLADELSEELNGWRMRTKEAENKVEHASSEKSEMLERIVHLETEMEKLSTSEIAADYCSTKMTERKKEIELAKYREDFENAAIVGLERISKEISELTKKTLKAKIIPSNISSIQLVCDELCRRLSREREQQHEYAKVMRDVNEKIEKLQLEKDALEHELKMMSSNNENVPPVGTSVSGMPTKTSNQKCAQPHYTSPTRQLLHESTMAVDAIVQKLKKTHNMSGMGPELKETIGNVINESRVLRDFLHQKLILFKGIDMSNWKNETVDQLITDLGQLHQDNLMLEEQIKKYKKELKLTKSAIPTLGVEFQDRIKTEIGKIATDMGGAVKEIRKKGTEQKLISEEDLGAPGSAGSAAGSGASNFTQFVLVDNGGTGDVTVAPSNFANGIAEWISSNSRSQAYKVTCSVRQSSAQNRKYTIKVEVPKGAWRSYLNMELTIPIFATNSDCELIVKAMQGLLKDGNPIPSAIAANSGIY

SEQ ID NO: 89 - DNA, 4611 bp, Artificial Sequence
  Description of Artificial Sequence: Synthetic polynucleotide
  KIF13A-FUS-MCP-PylRS AF
  CDS (1)..(4611)
atgtcggataccaaggtaaaagttgccgtccgggtccggcccatgaaccgacgagaactggaactgaacaccaagtgcgtggtggagatggaagggaatcaaacggtcctgcaccctcctccttctaacaccaaacagggagaaaggaaacctcccaaggtatttgcctttgattattgcttttggtccatggatgaatctaacactacaaaatacgctggtcaagaagtggttttcaagtgccttggggaaggaattcttgaaaaagcctttcaggggtataatgcgtgtatttttgcatatggacagacaggttcgggaaaatccttttccatgatgggccatgctgagcagctgggccttattccaaggctctgctgtgctttatttaaaaggatctctttggagcaaaatgagtcacagacctttaaagttgaagtgtcctatatggaaatttataatgagaaagttcgggatcttttagaccccaaagggagtagacagtctcttaaagttcgagaacataaagttttgggaccatatgtagatggtttatctcaactagctgtcactagttttgaggatattgagtcattgatgtctgagggaaataagtctcgaacggtagctgctaccaacatgaacgaagaaagcagccgctcccatgctgtgttcaacatcataatcacacagacactttatgacctgcagtctgggaattccggggagaaagtcagtaaggtcagcttggtagacctggcgggtagcgaaagagtatctaaaacaggagctgcaggagagcgactgaaagaaggcagcaacattaacaaatcgcttacaaccttggggttggttatatcatcactggctgaccaggcagctggcaagggtaaaagcaaatttgtgccttatcgagattcagtcctcacttggctgcttaaggacaacttggggggcaacagccaaacctctatgatagccacaatcagcccagccgcagacaactatgaagagaccctctccacattaagatatgcagaccgagccaaaaggattgtgaaccatgctgttgtgaatgaggaccccaacgcaaaagtgatccgagaactgcgggaggaagtcgagaaactgagagagcagctctctcaggcagaggccatgaaggccgaactgaaggagaagctcgaagagtctgaaaagctgataaaagaactaacagtgacttgggaatatacagatattgaaatgaacagattgggaaagggcgcccccggctccgccggctccgccgccggctccggcatggcctcaaacgattatacccaacaagcaacccaaagctatggggcctaccccacccagcccgggcagggctattcccagcagagcagtcagccctacggacagcagagttacagtggttatagccagtccacggacacttcaggatatggccagagcagctattcttcttatggccagagccagaacacaggctatggaactcagtcaactccccagggatatggctcgactggcggctatggcagtagccagagctcccaatcgtcttacgggcagcagtcctcctaccctggctatggccagcagccagctcccagcagcacctcgggaagttacggtagcagttctcagagcagcagctatgggcagccccagagtgggagctacagccagcagcctagctatggtggacagcagcaaagctatggacagcagcaaagctataatccccctcagggctatggacagcagaaccagtacaacagcagcagtggtggtggaggtggaggtggaggtggaggtaactatggccaagatcaatcctccatgagtagtggtggtggcagtggtggcggttatggcaatcaagaccagagtggtggaggtggcagcggtggctatggacagcaggaccgtggaggccgcggcaggggtggcagtggtggcggcggcggcggcggcggtggtggttacaaccgcagcagtggtggctatgaacccagaggtcgtggaggtggccgtggaggcagaggtggcatgggcggaagtgaccgtggtggcttcaataaatttggtggccctcgggaccaaggatcacgtcatgactccgaacaggataattcagacaacaacaccatctttgtgcaaggcctgggtgagaatgttacaattgagtctgtggctgattacttcaagcagattggtattattaagacaaacaagaaaacgggacagcccatgattaatttgtacacagacagggaaactggcaagctgaagggagaggcaacggtctcttttgatgacccaccttcagctaaagcagctattgactggtttgatggtaaagaattctccggaaatcctatcaaggtctcatttgctactcgccgggcagactttaatcggggtggtggcaatggtcgtggaggccgagggcgaggaggacccatgggccgtggaggctatggaggtggtggcagtggtggtggtggccgaggaggatttcccagtggaggtggtggcggtggaggacagcagcgagctggtgactggaagtgtcctaatcccacctgtgagaatatgaacttctcttggaggaatgaatgcaaccagtgtaaggcccctaaaccagatggcccaggagggggaccaggtggctctcacatggggggtaactacggggatgatcgtcgtggtggcagaggaggcgattacaaggatgacgacgataagggtaccggcgcccccggctccgccggctccgccgccggctccggcgcttctaactttactcagttcgttctcgtcgacaatggcggaactggcgacgtgactgtcgccccaagcaacttcgctaacgggatcgctgaatggatcagctctaactcgcgttcacaggcttacaaagtaacctgtagcgttcgtcagagctctgcgcagaatcgcaaatacaccatcaaagtcgaggtgcctaaaggcgcctggcgttcgtacttaaatatggaactaaccattccaattttcgccacgaattccgactgcgagcttattgttaaggcaatgcaaggtctcctaaaagatggaaacccgattccctcagcaatcgcagcaaactccggcatctacggtaccggcgcccccggctccgccggctccgccgccggctccggcgcgtgcccggtgccgctgcagctgccgccgctggaacgcctgaccctggatgataaaaaaccgctgaataccctgatctctgctactggtctgtggatgagtcgtaccggaaccattcataaaatcaaacaccacgaggttagccgttcgaaaatctatattgagatggcgtgtggcgatcatctggttgtgaacaatagccgctcttctcgtacagcacgtgcactgcgtcaccacaaatatcgtaaaacctgtaaacgttgccgtgtgtccgatgaggatctgaacaaattcctgacaaaagccaatgaggaccaaacaagcgtgaaagtgaaagtcgttagcgctcctacccgtactaaaaaagcaatgccgaaatccgttgctcgtgcccctaaaccactggaaaacactgaagcagcacaggcacagccgtctggaagcaaattctctccggccattcctgtttctacccaggagtccgtttctgttccagcaagtgtgagcaccagcattagcagtattagcaccggtgccaccgctagcgccctggttaaaggcaataccaatccgattacaagcatgtctgccccggttcaagcatcagctccagcactgacaaaatcccaaaccgatcgtctggaggttctgctgaatccgaaagacgaaatcagcctgaattccggcaaaccgtttcgtgaactggagagcgaactgctgtcacgtcgtaaaaaagacctgcaacaaatctatgccgaagaacgtgagaactatctggggaaactggaacgtgaaatcacccgctttttcgtggatcgtggctttctggagatcaaatccccgattctgattcctctggagtatatcgagcgtatgggcatcgacaatgataccgaactgagcaaacaaattttccgtgtggataaaaacttctgtctgcgccctatgctagcaccaaatctggctaactatctgcgcaaactggaccgtgccctgcctgatcctatcaaaatcttcgagatcggcccgtgttatcgtaaagagtccgacggtaaagaacatctggaggagtttaccatgctgaacttttgccaaatgggttcaggttgtactcgtgagaacctggaaagcatcatcaccgattttctgaaccacctgggcattgacttcaaaattgtgggcgacagctgtatggtgtttggcgacaccctggatgtcatgcacggcgacctggaactgtctagtgccgttgtgggcccaatcccgctggatcgtgagtggggtatcgacaaaccttggatcggtgcgggttttggtctggagcgtctgctgaaagtaaaacacgacttcaagaacatcaaacgtgctgcacgttccgagtcctattacaatggtatttctactaacctgtaa

SEQ ID NO: 90 - protein, 1536 aa, Artificial Sequence
  Description of Artificial Sequence: Synthetic polypeptide
  KIF13A-FUS-MCP-PylRS AF
MSDTKVKVAVRVRPMNRRELELNTKCVVEMEGNQTVLHPPPSNTKQGERKPPKVFAFDYCFWSMDESNTTKYAGQEVVFKCLGEGILEKAFQGYNACIFAYGQTGSGKSFSMMGHAEQLGLIPRLCCALFKRISLEQNESQTFKVEVSYMEIYNEKVRDLLDPKGSRQSLKVREHKVLGPYVDGLSQLAVTSFEDIESLMSEGNKSRTVAATNMNEESSRSHAVFNIIITQTLYDLQSGNSGEKVSKVSLVDLAGSERVSKTGAAGERLKEGSNINKSLTTLGLVISSLADQAAGKGKSKFVPYRDSVLTWLLKDNLGGNSQTSMIATISPAADNYEETLSTLRYADRAKRIVNHAVVNEDPNAKVIRELREEVEKLREQLSQAEAMKAELKEKLEESEKLIKELTVTWEYTDIEMNRLGKGAPGSAGSAAGSGMASNDYTQQATQSYGAYPTQPGQGYSQQSSQPYGQQSYSGYSQSTDTSGYGQSSYSSYGQSQNTGYGTQSTPQGYGSTGGYGSSQSSQSSYGQQSSYPGYGQQPAPSSTSGSYGSSSQSSSYGQPQSGSYSQQPSYGGQQQSYGQQQSYNPPQGYGQQNQYNSSSGGGGGGGGGGNYGQDQSSMSSGGGSGGGYGNQDQSGGGGSGGYGQQDRGGRGRGGSGGGGGGGGGGYNRSSGGYEPRGRGGGRGGRGGMGGSDRGGFNKFGGPRDQGSRHDSEQDNSDNNTIFVQGLGENVTIESVADYFKQIGIIKTNKKTGQPMINLYTDRETGKLKGEATVSFDDPPSAKAAIDWFDGKEFSGNPIKVSFATRRADFNRGGGNGRGGRGRGGPMGRGGYGGGGSGGGGRGGFPSGGGGGGGQQRAGDWKCPNPTCENMNFSWRNECNQCKAPKPDGPGGGPGGSHMGGNYGDDRRGGRGGDYKDDDDKGTGAPGSAGSAAGSGASNFTQFVLVDNGGTGDVTVAPSNFANGIAEWISSNSRSQAYKVTCSVRQSSAQNRKYTIKVEVPKGAWRSYLNMELTIPIFATNSDCELIVKAMQGLLKDGNPIPSAIAANSGIYGTGAPGSAGSAAGSGACPVPLQLPPLERLTLDDKKPLNTLISATGLWMSRTGTIHKIKHHEVSRSKIYIEMACGDHLVVNNSRSSRTARALRHHKYRKTCKRCRVSDEDLNKFLTKANEDQTSVKVKVVSAPTRTKKAMPKSVARAPKPLENTEAAQAQPSGSKFSPAIPVSTQESVSVPASVSTSISSISTGATASALVKGNTNPITSMSAPVQASAPALTKSQTDRLEVLLNPKDEISLNSGKPFRELESELLSRRKKDLQQIYAEERENYLGKLEREITRFFVDRGFLEIKSPILIPLEYIERMGIDNDTELSKQIFRVDKNFCLRPMLAPNLANYLRKLDRALPDPIKIFEIGPCYRKESDGKEHLEEFTMLNFCQMGSGCTRENLESIITDFLNHLGIDFKIVGDSCMVFGDTLDVMHGDLELSSAVVGPIPLDREWGIDKPWIGAGFGLERLLKVKHDFKNIKRAARSESYYNGISTNL

SEQ ID NO: 91 - DNA, 2718 bp, Artificial Sequence
  Description of Artificial Sequence: Synthetic polynucleotide
  KIF13A-PylRS AF
  CDS (1)..(2718)
atgtcggataccaaggtaaaagttgccgtccgggtccggcccatgaaccgacgagaactggaactgaacaccaagtgcgtggtggagatggaagggaatcaaacggtcctgcaccctcctccttctaacaccaaacagggagaaaggaaacctcccaaggtatttgcctttgattattgcttttggtccatggatgaatctaacactacaaaatacgctggtcaagaagtggttttcaagtgccttggggaaggaattcttgaaaaagcctttcaggggtataatgcgtgtatttttgcatatggacagacaggttcgggaaaatccttttccatgatgggccatgctgagcagctgggccttattccaaggctctgctgtgctttatttaaaaggatctctttggagcaaaatgagtcacagacctttaaagttgaagtgtcctatatggaaatttataatgagaaagttcgggatcttttagaccccaaagggagtagacagtctcttaaagttcgagaacataaagttttgggaccatatgtagatggtttatctcaactagctgtcactagttttgaggatattgagtcattgatgtctgagggaaataagtctcgaacggtagctgctaccaacatgaacgaagaaagcagccgctcccatgctgtgttcaacatcataatcacacagacactttatgacctgcagtctgggaattccggggagaaagtcagtaaggtcagcttggtagacctggcgggtagcgaaagagtatctaaaacaggagctgcaggagagcgactgaaagaaggcagcaacattaacaaatcgcttacaaccttggggttggttatatcatcactggctgaccaggcagctggcaagggtaaaagcaaatttgtgccttatcgagattcagtcctcacttggctgcttaaggacaacttggggggcaacagccaaacctctatgatagccacaatcagcccagccgcagacaactatgaagagaccctctccacattaagatatgcagaccgagccaaaaggattgtgaaccatgctgttgtgaatgaggaccccaacgcaaaagtgatccgagaactgcgggaggaagtcgagaaactgagagagcagctctctcaggcagaggccatgaaggccgaactgaaggagaagctcgaagagtctgaaaagctgataaaagaactaacagtgacttgggaatatacagatattgaaatgaacagattgggaaagggcgcccccggctccgccggctccgccgccggctccggcatggcgtgcccggtgccgctgcagctgccgccgctggaacgcctgaccctggatgataaaaaaccgctgaataccctgatctctgctactggtctgtggatgagtcgtaccggaaccattcataaaatcaaacaccacgaggttagccgttcgaaaatctatattgagatggcgtgtggcgatcatctggttgtgaacaatagccgctcttctcgtacagcacgtgcactgcgtcaccacaaatatcgtaaaacctgtaaacgttgccgtgtgtccgatgaggatctgaacaaattcctgacaaaagccaatgaggaccaaacaagcgtgaaagtgaaagtcgttagcgctcctacccgtactaaaaaagcaatgccgaaatccgttgctcgtgcccctaaaccactggaaaacactgaagcagcacaggcacagccgtctggaagcaaattctctccggccattcctgtttctacccaggagtccgtttctgttccagcaagtgtgagcaccagcattagcagtattagcaccggtgccaccgctagcgccctggttaaaggcaataccaatccgattacaagcatgtctgccccggttcaagcatcagctccagcactgacaaaatcccaaaccgatcgtctggaggttctgctgaatccgaaagacgaaatcagcctgaattccggcaaaccgtttcgtgaactggagagcgaactgctgtcacgtcgtaaaaaagacctgcaacaaatctatgccgaagaacgtgagaactatctggggaaactggaacgtgaaatcacccgctttttcgtggatcgtggctttctggagatcaaatccccgattctgattcctctggagtatatcgagcgtatgggcatcgacaatgataccgaactgagcaaacaaattttccgtgtggataaaaacttctgtctgcgccctatgctagcaccaaatctggctaactatctgcgcaaactggaccgtgccctgcctgatcctatcaaaatcttcgagatcggcccgtgttatcgtaaagagtccgacggtaaagaacatctggaggagtttaccatgctgaacttttgccaaatgggttcaggttgtactcgtgagaacctggaaagcatcatcaccgattttctgaaccacctgggcattgacttcaaaattgtgggcgacagctgtatggtgtttggcgacaccctggatgtcatgcacggcgacctggaactgtctagtgccgttgtgggcccaatcccgctggatcgtgagtggggtatcgacaaaccttggatcggtgcgggttttggtctggagcgtctgctgaaagtaaaacacgacttcaagaacatcaaacgtgctgcacgttccgagtcctattacaatggtatttctactaacctgtaa

SEQ ID NO: 92 - protein, 905 aa, Artificial Sequence
  Description of Artificial Sequence: Synthetic polypeptide
  KIF13A-PylRS AF
MSDTKVKVAVRVRPMNRRELELNTKCVVEMEGNQTVLHPPPSNTKQGERKPPKVFAFDYCFWSMDESNTTKYAGQEVVFKCLGEGILEKAFQGYNACIFAYGQTGSGKSFSMMGHAEQLGLIPRLCCALFKRISLEQNESQTFKVEVSYMEIYNEKVRDLLDPKGSRQSLKVREHKVLGPYVDGLSQLAVTSFEDIESLMSEGNKSRTVAATNMNEESSRSHAVFNIIITQTLYDLQSGNSGEKVSKVSLVDLAGSERVSKTGAAGERLKEGSNINKSLTTLGLVISSLADQAAGKGKSKFVPYRDSVLTWLLKDNLGGNSQTSMIATISPAADNYEETLSTLRYADRAKRIVNHAVVNEDPNAKVIRELREEVEKLREQLSQAEAMKAELKEKLEESEKLIKELTVTWEYTDIEMNRLGKGAPGSAGSAAGSGMACPVPLQLPPLERLTLDDKKPLNTLISATGLWMSRTGTIHKIKHHEVSRSKIYIEMACGDHLVVNNSRSSRTARALRHHKYRKTCKRCRVSDEDLNKFLTKANEDQTSVKVKVVSAPTRTKKAMPKSVARAPKPLENTEAAQAQPSGSKFSPAIPVSTQESVSVPASVSTSISSISTGATASALVKGNTNPITSMSAPVQASAPALTKSQTDRLEVLLNPKDEISLNSGKPFRELESELLSRRKKDLQQIYAEERENYLGKLEREITRFFVDRGFLEIKSPILIPLEYIERMGIDNDTELSKQIFRVDKNFCLRPMLAPNLANYLRKLDRALPDPIKIFEIGPCYRKESDGKEHLEEFTMLNFCQMGSGCTRENLESIITDFLNHLGIDFKIVGDSCMVFGDTLDVMHGDLELSSAVVGPIPLDREWGIDKPWIGAGFGLERLLKVKHDFKNIKRAARSESYYNGISTNL

SEQ ID NO: 93 - DNA, 1656 bp, Artificial Sequence
  Description of Artificial Sequence: Synthetic polynucleotide
  KIF13A-MCP
  CDS (1)..(1656)
atgtcggataccaaggtaaaagttgccgtccgggtccggcccatgaaccgacgagaactggaactgaacaccaagtgcgtggtggagatggaagggaatcaaacggtcctgcaccctcctccttctaacaccaaacagggagaaaggaaacctcccaaggtatttgcctttgattattgcttttggtccatggatgaatctaacactacaaaatacgctggtcaagaagtggttttcaagtgccttggggaaggaattcttgaaaaagcctttcaggggtataatgcgtgtatttttgcatatggacagacaggttcgggaaaatccttttccatgatgggccatgctgagcagctgggccttattccaaggctctgctgtgctttatttaaaaggatctctttggagcaaaatgagtcacagacctttaaagttgaagtgtcctatatggaaatttataatgagaaagttcgggatcttttagaccccaaagggagtagacagtctcttaaagttcgagaacataaagttttgggaccatatgtagatggtttatctcaactagctgtcactagttttgaggatattgagtcattgatgtctgagggaaataagtctcgaacggtagctgctaccaacatgaacgaagaaagcagccgctcccatgctgtgttcaacatcataatcacacagacactttatgacctgcagtctgggaattccggggagaaagtcagtaaggtcagcttggtagacctggcgggtagcgaaagagtatctaaaacaggagctgcaggagagcgactgaaagaaggcagcaacattaacaaatcgcttacaaccttggggttggttatatcatcactggctgaccaggcagctggcaagggtaaaagcaaatttgtgccttatcgagattcagtcctcacttggctgcttaaggacaacttggggggcaacagccaaacctctatgatagccacaatcagcccagccgcagacaactatgaagagaccctctccacattaagatatgcagaccgagccaaaaggattgtgaaccatgctgttgtgaatgaggaccccaacgcaaaagtgatccgagaactgcgggaggaagtcgagaaactgagagagcagctctctcaggcagaggccatgaaggccgaactgaaggagaagctcgaagagtctgaaaagctgataaaagaactaacagtgacttgggaatatacagatattgaaatgaacagattgggaaagggcgcccccggctccgccggctccgccgccggctccggcatggcttctaactttactcagttcgttctcgtcgacaatggcggaactggcgacgtgactgtcgccccaagcaacttcgctaacgggatcgctgaatggatcagctctaactcgcgttcacaggcttacaaagtaacctgtagcgttcgtcagagctctgcgcagaatcgcaaatacaccatcaaagtcgaggtgcctaaaggcgcctggcgttcgtacttaaatatggaactaaccattccaattttcgccacgaattccgactgcgagcttattgttaaggcaatgcaaggtctcctaaaagatggaaacccgattccctcagcaatcgcagcaaactccggcatctactaa

SEQ ID NO: 94 - protein, 551 aa, Artificial Sequence
  Description of Artificial Sequence: Synthetic polypeptide
  KIF13A-MCP
MSDTKVKVAVRVRPMNRRELELNTKCVVEMEGNQTVLHPPPSNTKQGERKPPKVFAFDYCFWSMDESNTTKYAGQEVVFKCLGEGILEKAFQGYNACIFAYGQTGSGKSFSMMGHAEQLGLIPRLCCALFKRISLEQNESQTFKVEVSYMEIYNEKVRDLLDPKGSRQSLKVREHKVLGPYVDGLSQLAVTSFEDIESLMSEGNKSRTVAATNMNEESSRSHAVFNIIITQTLYDLQSGNSGEKVSKVSLVDLAGSERVSKTGAAGERLKEGSNINKSLTTLGLVISSLADQAAGKGKSKFVPYRDSVLTWLLKDNLGGNSQTSMIATISPAADNYEETLSTLRYADRAKRIVNHAVVNEDPNAKVIRELREEVEKLREQLSQAEAMKAELKEKLEESEKLIKELTVTWEYTDIEMNRLGKGAPGSAGSAAGSGMASNFTQFVLVDNGGTGDVTVAPSNFANGIAEWISSNSRSQAYKVTCSVRQSSAQNRKYTIKVEVPKGAWRSYLNMELTIPIFATNSDCELIVKAMQGLLKDGNPIPSAIAANSGIY

SEQ ID NO: 95 - DNA, 2544 bp, Artificial Sequence
  Description of Artificial Sequence: Synthetic polynucleotide
  TOMM20-EWSR1-MCP
  CDS (1)..(2544)
atggtgggtcggaacagcgccatcgccgccggtgtatgcggggcccttttcattgggtactgcatctacttcgaccgcaaaagacgaagtgaccccaacttcaagaacaggcttcgagaacgaagaaagaaacagaagcttgccaaggagagagctgggctttccaagttacctgaccttaaagatgctgaagctgttcagaagttcttcatggcgtccacggattacagtacctatagccaagctgcagcgcagcagggctacagtgcttacaccgcccagcccactcaaggatatgcacagaccacccaggcatatgggcaacaaagctatggaacctatggacagcccactgatgtcagctatacccaggctcagaccactgcaacctatgggcagaccgcctatgcaacttcttatggacagcctcccactggttatactactccaactgccccccaggcatacagccagcctgtccaggggtatggcactggtgcttatgataccaccactgctacagtcaccaccacccaggcctcctatgcagctcagtctgcatatggcactcagcctgcttatccagcctatgggcagcagccagcagccactgcacctacaagaccgcaggatggaaacaagcccactgagactagtcaacctcaatctagcacagggggttacaaccagcccagcctaggatatggacagagtaactacagttatccccaggtacctgggagctaccccatgcagccagtcactgcacctccatcctaccctcctaccagctattcctctacacagccgactagttatgatcagagcagttactctcagcagaacacctatgggcaaccgagcagctatggacagcagagtagctatggtcaacaaagcagctatgggcagcagcctcccactagttacccaccccaaactggatcctacagccaagctccaagtcaatatagccaacagagcagcagctacgggcagcagagttcattccgacaggaccaccccagtagcatgggtgtttatgggcaggagtctggaggattttccggaccaggagagaaccggagcatgagtggccctgataaccggggcaggggaagagggggatttgatcgtggaggcatgagcagaggtgggcggggaggaggacgcggtggaatgggcagcgctggagagcgaggtggcttcaataagcctggtggacccatggatgaaggaccagatcttgatctaggcccacctgtagatccagatgaagactctgacaacagtgcaatttatgtacaaggattaaatgacagtgtgactctagatgatctggcagacttctttaagcagtgtggggttgttaagatgaacaagagaactgggcaacccatgatccacatctacctggacaaggaaacaggaaagcccaaaggcgatgccacagtgtcctatgaagacccacctactgccaaggctgccgtggaatggtttgatgggaaagattttcaagggagcaaacttaaagtctcccttgctcggaagaagcctccaatgaacagtatgcggggtggtctgccaccccgtgagggcagaggcatgccaccaccactccgtggaggtccaggaggcccaggaggtcctgggggacccatgggtcgcatgggaggccgtggaggagatagaggaggcttccctccaagaggaccccggggttcccgagggaacccctctggaggaggaaacgtccagcaccgagctggagactggcagtgtcccaatccgggttgtggaaaccagaacttcgcctggagaacagagtgcaaccagtgtaaggccccaaagcctgaaggcttcctcccgccaccctttccgcccccgggtggtgatcgtggcagaggtggccctggtggcatgcggggaggaagaggtggcctcatggatcgtggtggtcccggtggaatgttcagaggtggccgtggtggagacagaggtggcttccgtggtggccggggcatggaccgaggtggctttggtggaggaagacgaggtggccctggggggccccctggacctttgatggaacaggattacaaggatgacgacgataagggtaccgagcagaagctgatctcagaggaggacctgggcgcccccggctccgccggctccgccgccggctccggcgcttctaactttactcagttcgttctcgtcgacaatggcggaactggcgacgtgactgtcgccccaagcaacttcgctaacgggatcgctgaatggatcagctctaactcgcgttcacaggcttacaaagtaacctgtagcgttcgtcagagctctgcgcagaatcgcaaatacaccatcaaagtcgaggtgcctaaaggcgcctggcgttcgtacttaaatatggaactaaccattccaattttcgccacgaattccgactgcgagcttattgttaaggcaatgcaaggtctcctaaaagatggaaacccgattccctcagcaatcgcagcaaactccggcatctactaa

SEQ ID NO: 96 - protein, 847 aa, Artificial Sequence
  Description of Artificial Sequence: Synthetic polypeptide
  TOMM20-EWSR1-MCP
MVGRNSAIAAGVCGALFIGYCIYFDRKRRSDPNFKNRLRERRKKQKLAKERAGLSKLPDLKDAEAVQKFFMASTDYSTYSQAAAQQGYSAYTAQPTQGYAQTTQAYGQQSYGTYGQPTDVSYTQAQTTATYGQTAYATSYGQPPTGYTTPTAPQAYSQPVQGYGTGAYDTTTATVTTTQASYAAQSAYGTQPAYPAYGQQPAATAPTRPQDGNKPTETSQPQSSTGGYNQPSLGYGQSNYSYPQVPGSYPMQPVTAPPSYPPTSYSSTQPTSYDQSSYSQQNTYGQPSSYGQQSSYGQQSSYGQQPPTSYPPQTGSYSQAPSQYSQQSSSYGQQSSFRQDHPSSMGVYGQESGGFSGPGENRSMSGPDNRGRGRGGFDRGGMSRGGRGGGRGGMGSAGERGGFNKPGGPMDEGPDLDLGPPVDPDEDSDNSAIYVQGLNDSVTLDDLADFFKQCGVVKMNKRTGQPMIHIYLDKETGKPKGDATVSYEDPPTAKAAVEWFDGKDFQGSKLKVSLARKKPPMNSMRGGLPPREGRGMPPPLRGGPGGPGGPGGPMGRMGGRGGDRGGFPPRGPRGSRGNPSGGGNVQHRAGDWQCPNPGCGNQNFAWRTECNQCKAPKPEGFLPPPFPPPGGDRGRGGPGGMRGGRGGLMDRGGPGGMFRGGRGGDRGGFRGGRGMDRGGFGGGRRGGPGGPPGPLMEQDYKDDDDKGTEQKLISEEDLGAPGSAGSAAGSGASNFTQFVLVDNGGTGDVTVAPSNFANGIAEWISSNSRSQAYKVTCSVRQSSAQNRKYTIKVEVPKGAWRSYLNMELTIPIFATNSDCELIVKAMQGLLKDGNPIPSAIAANSGIY

SEQ ID NO: 97 - DNA, 2520 bp, Artificial Sequence
  Description of Artificial Sequence: Synthetic polynucleotide
  TOMM20-EWSR1-HA-MCP
  CDS (1)..(2520)
atggtgggtcggaacagcgccatcgccgccggtgtatgcggggcccttttcattgggtactgcatctacttcgaccgcaaaagacgaagtgaccccaacttcaagaacaggcttcgagaacgaagaaagaaacagaagcttgccaaggagagagctgggctttccaagttacctgaccttaaagatgctgaagctgttcagaagttcttcatggcgtccacggattacagtacctatagccaagctgcagcgcagcagggctacagtgcttacaccgcccagcccactcaaggatatgcacagaccacccaggcatatgggcaacaaagctatggaacctatggacagcccactgatgtcagctatacccaggctcagaccactgcaacctatgggcagaccgcctatgcaacttcttatggacagcctcccactggttatactactccaactgccccccaggcatacagccagcctgtccaggggtatggcactggtgcttatgataccaccactgctacagtcaccaccacccaggcctcctatgcagctcagtctgcatatggcactcagcctgcttatccagcctatgggcagcagccagcagccactgcacctacaagaccgcaggatggaaacaagcccactgagactagtcaacctcaatctagcacagggggttacaaccagcccagcctaggatatggacagagtaactacagttatccccaggtacctgggagctaccccatgcagccagtcactgcacctccatcctaccctcctaccagctattcctctacacagccgactagttatgatcagagcagttactctcagcagaacacctatgggcaaccgagcagctatggacagcagagtagctatggtcaacaaagcagctatgggcagcagcctcccactagttacccaccccaaactggatcctacagccaagctccaagtcaatatagccaacagagcagcagctacgggcagcagagttcattccgacaggaccaccccagtagcatgggtgtttatgggcaggagtctggaggattttccggaccaggagagaaccggagcatgagtggccctgataaccggggcaggggaagagggggatttgatcgtggaggcatgagcagaggtgggcggggaggaggacgcggtggaatgggcagcgctggagagcgaggtggcttcaataagcctggtggacccatggatgaaggaccagatcttgatctaggcccacctgtagatccagatgaagactctgacaacagtgcaatttatgtacaaggattaaatgacagtgtgactctagatgatctggcagacttctttaagcagtgtggggttgttaagatgaacaagagaactgggcaacccatgatccacatctacctggacaaggaaacaggaaagcccaaaggcgatgccacagtgtcctatgaagacccacctactgccaaggctgccgtggaatggtttgatgggaaagattttcaagggagcaaacttaaagtctcccttgctcggaagaagcctccaatgaacagtatgcggggtggtctgccaccccgtgagggcagaggcatgccaccaccactccgtggaggtccaggaggcccaggaggtcctgggggacccatgggtcgcatgggaggccgtggaggagatagaggaggcttccctccaagaggaccccggggttcccgagggaacccctctggaggaggaaacgtccagcaccgagctggagactggcagtgtcccaatccgggttgtggaaaccagaacttcgcctggagaacagagtgcaaccagtgtaaggccccaaagcctgaaggcttcctcccgccaccctttccgcccccgggtggtgatcgtggcagaggtggccctggtggcatgcggggaggaagaggtggcctcatggatcgtggtggtcccggtggaatgttcagaggtggccgtggtggagacagaggtggcttccgtggtggccggggcatggaccgaggtggctttggtggaggaagacgaggtggccctggggggccccctggacctttgatggaacaggcgatcgcatatccctatgatgtgccggattatgctggagcaccaggaagtgctggttctgctgctggtagtggagcttctaactttactcagttcgttctcgtcgacaatggcggaactggcgacgtgactgtcgccccaagcaacttcgctaacgggatcgctgaatggatcagctctaactcgcgttcacaggcttacaaagtaacctgtagcgttcgtcagagctctgcgcagaatcgcaaatacaccatcaaagtcgaggtgcctaaaggcgcctggcgttcgtacttaaatatggaactaaccattccaattttcgccacgaattccgactgcgagcttattgttaaggcaatgcaaggtctcctaaaagatggaaacccgattccctcagcaatcgcagcaaactccggcatctactaa

SEQ ID NO: 98 - protein, 839 aa, Artificial Sequence
  Description of Artificial Sequence: Synthetic polypeptide
  TOMM20-EWSR1-HA-MCP
MVGRNSAIAAGVCGALFIGYCIYFDRKRRSDPNFKNRLRERRKKQKLAKERAGLSKLPDLKDAEAVQKFFMASTDYSTYSQAAAQQGYSAYTAQPTQGYAQTTQAYGQQSYGTYGQPTDVSYTQAQTTATYGQTAYATSYGQPPTGYTTPTAPQAYSQPVQGYGTGAYDTTTATVTTTQASYAAQSAYGTQPAYPAYGQQPAATAPTRPQDGNKPTETSQPQSSTGGYNQPSLGYGQSNYSYPQVPGSYPMQPVTAPPSYPPTSYSSTQPTSYDQSSYSQQNTYGQPSSYGQQSSYGQQSSYGQQPPTSYPPQTGSYSQAPSQYSQQSSSYGQQSSFRQDHPSSMGVYGQESGGFSGPGENRSMSGPDNRGRGRGGFDRGGMSRGGRGGGRGGMGSAGERGGFNKPGGPMDEGPDLDLGPPVDPDEDSDNSAIYVQGLNDSVTLDDLADFFKQCGVVKMNKRTGQPMIHIYLDKETGKPKGDATVSYEDPPTAKAAVEWFDGKDFQGSKLKVSLARKKPPMNSMRGGLPPREGRGMPPPLRGGPGGPGGPGGPMGRMGGRGGDRGGFPPRGPRGSRGNPSGGGNVQHRAGDWQCPNPGCGNQNFAWRTECNQCKAPKPEGFLPPPFPPPGGDRGRGGPGGMRGGRGGLMDRGGPGGMFRGGRGGDRGGFRGGRGMDRGGFGGGRRGGPGGPPGPLMEQAIAYPYDVPDYAGAPGSAGSAAGSGASNFTQFVLVDNGGTGDVTVAPSNFANGIAEWISSNSRSQAYKVTCSVRQSSAQNRKYTIKVEVPKGAWRSYLNMELTIPIFATNSDCELIVKAMQGLLKDGNPIPSAIAANSGIY

SEQ ID NO: 99 - DNA, 3126 bp, Artificial Sequence
  Description of Artificial Sequence: Synthetic polynucleotide
  TOMM20-FUS-PylRS AF
  CDS (1)..(3126)
atggtgggtcggaacagcgccatcgccgccggtgtatgcggggcccttttcattgggtactgcatctacttcgaccgcaaaagacgaagtgaccccaacttcaagaacaggcttcgagaacgaagaaagaaacagaagcttgccaaggagagagctgggctttccaagttacctgaccttaaagatgctgaagctgttcagaaattcttcatggcctcaaacgattatacccaacaagcaacccaaagctatggggcctaccccacccagcccgggcagggctattcccagcagagcagtcagccctacggacagcagagttacagtggttatagccagtccacggacacttcaggatatggccagagcagctattcttcttatggccagagccagaacacaggctatggaactcagtcaactccccagggatatggctcgactggcggctatggcagtagccagagctcccaatcgtcttacgggcagcagtcctcctaccctggctatggccagcagccagctcccagcaacacctcgggaagttacggtagcagttctcagagcagcagctatgggcagccccagagtgggagctacagccagcagcctagctatggtggacagcagcaaagctatggacagcagcaaagctataatccccctcagggctatggacagcagaaccagtacaacagcagcagtggtggtggaggtggaggtggaggtggaggtaactatggccaagatcaatcctccatgagtagtggtggtggcagtggtggcggttatggcaatcaagaccagagtggtggaggtggcagcggtggctatggacagcaggaccgtggaggccgcggcaggggtggcagtggtggcggcggcggcggcggcggtggtggttacaaccgcagcagtggtggctatgaacccagaggtcgtggaggtggccgtggaggcagaggtggcatgggcggaagtgaccgtggtggcttcaataaatttggtggccctcgggaccaaggatcacgtcatgactccgaacaggataattcagacaacaacaccatctttgtgcaaggcctgggtgagaatgttacaattgagtctgtggctgattacttcaagcagattggtattattaagacaaacaagaaaacgggacagcccatgattaatttgtacacagacagggaaactggcaagctgaagggagaggcaacggtctcttttgatgacccaccttcagctaaagcagctattgactggtttgatggtaaagaattctccggaaatcctatcaaggtctcatttgctactcgccgggcagactttaatcggggtggtggcaatggtcgtggaggccgagggcgaggaggacccatgggccgtggaggctatggaggtggtggcagtggtggtggtggccgaggaggatttcccagtggaggtggtggcggtggaggacagcagcgagctggtgactggaagtgtcctaatcccacctgtgagaatatgaacttctcttggaggaatgaatgcaaccagtgtaaggcccctaaaccagatggcccaggagggggaccaggtggctctcacatggggggtaactacggggatgatcgtcgtggtggcagaggaggcgattacaaggatgacgacgataagggtaccggcgcccccggctccgccggctccgccgccggctccggcgcgtgcccggtgccgctgcagctgccgccgctggaacgcctgaccctggatgataaaaaaccgctgaataccctgatctctgctactggtctgtggatgagtcgtaccggaaccattcataaaatcaaacaccacgaggttagccgttcgaaaatctatattgagatggcgtgtggcgatcatctggttgtgaacaatagccgctcttctcgtacagcacgtgcactgcgtcaccacaaatatcgtaaaacctgtaaacgttgccgtgtgtccgatgaggatctgaacaaattcctgacaaaagccaatgaggaccaaacaagcgtgaaagtgaaagtcgttagcgctcctacccgtactaaaaaagcaatgccgaaatccgttgctcgtgcccctaaaccactggaaaacactgaagcagcacaggcacagccgtctggaagcaaattctctccggccattcctgtttctacccaggagtccgtttctgttccagcaagtgtgagcaccagcattagcagtattagcaccggtgccaccgctagcgccctggttaaaggcaataccaatccgattacaagcatgtctgccccggttcaagcatcagctccagcactgacaaaatcccaaaccgatcgtctggaggttctgctgaatccgaaagacgaaatcagcctgaattccggcaaaccgtttcgtgaactggagagcgaactgctgtcacgtcgtaaaaaagacctgcaacaaatctatgccgaagaacgtgagaactatctggggaaactggaacgtgaaatcacccgctttttcgtggatcgtggctttctggagatcaaatccccgattctgattcctctggagtatatcgagcgtatgggcatcgacaatgataccgaactgagcaaacaaattttccgtgtggataaaaacttctgtctgcgccctatgctagcaccaaatctggctaactatctgcgcaaactggaccgtgccctgcctgatcctatcaaaatcttcgagatcggcccgtgttatcgtaaagagtccgacggtaaagaacatctggaggagtttaccatgctgaacttttgccaaatgggttcaggttgtactcgtgagaacctggaaagcatcatcaccgattttctgaaccacctgggcattgacttcaaaattgtgggcgacagctgtatggtgtttggcgacaccctggatgtcatgcacggcgacctggaactgtctagtgccgttgtgggcccaatcccgctggatcgtgagtggggtatcgacaaaccttggatcggtgcgggttttggtctggagcgtctgctgaaagtaaaacacgacttcaagaacatcaaacgtgctgcacgttccgagtcctattacaatggtatttctactaacctgtaa

SEQ ID NO: 100 - protein, 1041 aa, Artificial Sequence
  Description of Artificial Sequence: Synthetic polypeptide
  TOMM20-FUS-PylRS AF
MVGRNSAIAAGVCGALFIGYCIYFDRKRRSDPNFKNRLRERRKKQKLAKERAGLSKLPDLKDAEAVQKFFMASNDYTQQATQSYGAYPTQPGQGYSQQSSQPYGQQSYSGYSQSTDTSGYGQSSYSSYGQSQNTGYGTQSTPQGYGSTGGYGSSQSSQSSYGQQSSYPGYGQQPAPSNTSGSYGSSSQSSSYGQPQSGSYSQQPSYGGQQQSYGQQQSYNPPQGYGQQNQYNSSSGGGGGGGGGGNYGQDQSSMSSGGGSGGGYGNQDQSGGGGSGGYGQQDRGGRGRGGSGGGGGGGGGGYNRSSGGYEPRGRGGGRGGRGGMGGSDRGGFNKFGGPRDQGSRHDSEQDNSDNNTIFVQGLGENVTIESVADYFKQIGIIKTNKKTGQPMINLYTDRETGKLKGEATVSFDDPPSAKAAIDWFDGKEFSGNPIKVSFATRRADFNRGGGNGRGGRGRGGPMGRGGYGGGGSGGGGRGGFPSGGGGGGGQQRAGDWKCPNPTCENMNFSWRNECNQCKAPKPDGPGGGPGGSHMGGNYGDDRRGGRGGDYKDDDDKGTGAPGSAGSAAGSGACPVPLQLPPLERLTLDDKKPLNTLISATGLWMSRTGTIHKIKHHEVSRSKIYIEMACGDHLVVNNSRSSRTARALRHHKYRKTCKRCRVSDEDLNKFLTKANEDQTSVKVKVVSAPTRTKKAMPKSVARAPKPLENTEAAQAQPSGSKFSPAIPVSTQESVSVPASVSTSISSISTGATASALVKGNTNPITSMSAPVQASAPALTKSQTDRLEVLLNPKDEISLNSGKPFRELESELLSRRKKDLQQIYAEERENYLGKLEREITRFFVDRGFLEIKSPILIPLEYIERMGIDNDTELSKQIFRVDKNFCLRPMLAPNLANYLRKLDRALPDPIKIFEIGPCYRKESDGKEHLEEFTMLNFCQMGSGCTRENLESIITDFLNHLGIDFKIVGDSCMVFGDTLDVMHGDLELSSAVVGPIPLDREWGIDKPWIGAGFGLERLLKVKHDFKNIKRAARSESYYNGISTNL

SEQ ID NO: 101 - DNA, 3147 bp, Artificial Sequence
  Description of Artificial Sequence: Synthetic polynucleotide
  TOMM20-FUS-V5-PylRS AF
  CDS (1)..(3147)
atggtgggtcggaacagcgccatcgccgccggtgtatgcggggcccttttcattgggtactgcatctacttcgaccgcaaaagacgaagtgaccccaacttcaagaacaggcttcgagaacgaagaaagaaacagaagcttgccaaggagagagctgggctttccaagttacctgaccttaaagatgctgaagctgttcagaaattcttcatggcctcaaacgattatacccaacaagcaacccaaagctatggggcctaccccacccagcccgggcagggctattcccagcagagcagtcagccctacggacagcagagttacagtggttatagccagtccacggacacttcaggatatggccagagcagctattcttcttatggccagagccagaacacaggctatggaactcagtcaactccccagggatatggctcgactggcggctatggcagtagccagagctcccaatcgtcttacgggcagcagtcctcctaccctggctatggccagcagccagctcccagcaacacctcgggaagttacggtagcagttctcagagcagcagctatgggcagccccagagtgggagctacagccagcagcctagctatggtggacagcagcaaagctatggacagcagcaaagctataatccccctcagggctatggacagcagaaccagtacaacagcagcagtggtggtggaggtggaggtggaggtggaggtaactatggccaagatcaatcctccatgagtagtggtggtggcagtggtggcggttatggcaatcaagaccagagtggtggaggtggcagcggtggctatggacagcaggaccgtggaggccgcggcaggggtggcagtggtggcggcggcggcggcggcggtggtggttacaaccgcagcagtggtggctatgaacccagaggtcgtggaggtggccgtggaggcagaggtggcatgggcggaagtgaccgtggtggcttcaataaatttggtggccctcgggaccaaggatcacgtcatgactccgaacaggataattcagacaacaacaccatctttgtgcaaggcctgggtgagaatgttacaattgagtctgtggctgattacttcaagcagattggtattattaagacaaacaagaaaacgggacagcccatgattaatttgtacacagacagggaaactggcaagctgaagggagaggcaacggtctcttttgatgacccaccttcagctaaagcagctattgactggtttgatggtaaagaattctccggaaatcctatcaaggtctcatttgctactcgccgggcagactttaatcggggtggtggcaatggtcgtggaggccgagggcgaggaggacccatgggccgtggaggctatggaggtggtggcagtggtggtggtggccgaggaggatttcccagtggaggtggtggcggtggaggacagcagcgagctggtgactggaagtgtcctaatcccacctgtgagaatatgaacttctcttggaggaatgaatgcaaccagtgtaaggcccctaaaccagatggcccaggagggggaccaggtggctctcacatggggggtaactacggggatgatcgtcgtggtggcagaggaggcgcgatcgcaggcaagcctattcccaaccccctgctgggcctggatagcaccggagcaccaggaagtgctggttctgctgctggtagtggagcgtgcccggtgccgctgcagctgccgccgctggaacgcctgaccctggatgataaaaaaccgctgaataccctgatctctgctactggtctgtggatgagtcgtaccggaaccattcataaaatcaaacaccacgaggttagccgttcgaaaatctatattgagatggcgtgtggcgatcatctggttgtgaacaatagccgctcttctcgtacagcacgtgcactgcgtcaccacaaatatcgtaaaacctgtaaacgttgccgtgtgtccgatgaggatctgaacaaattcctgacaaaagccaatgaggaccaaacaagcgtgaaagtgaaagtcgttagcgctcctacccgtactaaaaaagcaatgccgaaatccgttgctcgtgcccctaaaccactggaaaacactgaagcagcacaggcacagccgtctggaagcaaattctctccggccattcctgtttctacccaggagtccgtttctgttccagcaagtgtgagcaccagcattagcagtattagcaccggtgccaccgctagcgccctggttaaaggcaataccaatccgattacaagcatgtctgccccggttcaagcatcagctccagcactgacaaaatcccaaaccgatcgtctggaggttctgctgaatccgaaagacgaaatcagcctgaattccggcaaaccgtttcgtgaactggagagcgaactgctgtcacgtcgtaaaaaagacctgcaacaaatctatgccgaagaacgtgagaactatctggggaaactggaacgtgaaatcacccgctttttcgtggatcgtggctttctggagatcaaatccccgattctgattcctctggagtatatcgagcgtatgggcatcgacaatgataccgaactgagcaaacaaattttccgtgtggataaaaacttctgtctgcgccctatgctagcaccaaatctggctaactatctgcgcaaactggaccgtgccctgcctgatcctatcaaaatcttcgagatcggcccgtgttatcgtaaagagtccgacggtaaagaacatctggaggagtttaccatgctgaacttttgccaaatgggttcaggttgtactcgtgagaacctggaaagcatcatcaccgattttctgaaccacctgggcattgacttcaaaattgtgggcgacagctgtatggtgtttggcgacaccctggatgtcatgcacggcgacctggaactgtctagtgccgttgtgggcccaatcccgctggatcgtgagtggggtatcgacaaaccttggatcggtgcgggttttggtctggagcgtctgctgaaagtaaaacacgacttcaagaacatcaaacgtgctgcacgttccgagtcctattacaatggtatttctactaacctgtaa

SEQ ID NO: 102 - protein, 1048 aa, Artificial Sequence
  Description of Artificial Sequence: Synthetic polypeptide
  TOMM20-FUS-V5-PylRS AF
MVGRNSAIAAGVCGALFIGYCIYFDRKRRSDPNFKNRLRERRKKQKLAKERAGLSKLPDLKDAEAVQKFFMASNDYTQQATQSYGAYPTQPGQGYSQQSSQPYGQQSYSGYSQSTDTSGYGQSSYSSYGQSQNTGYGTQSTPQGYGSTGGYGSSQSSQSSYGQQSSYPGYGQQPAPSNTSGSYGSSSQSSSYGQPQSGSYSQQPSYGGQQQSYGQQQSYNPPQGYGQQNQYNSSSGGGGGGGGGGNYGQDQSSMSSGGGSGGGYGNQDQSGGGGSGGYGQQDRGGRGRGGSGGGGGGGGGGYNRSSGGYEPRGRGGGRGGRGGMGGSDRGGFNKFGGPRDQGSRHDSEQDNSDNNTIFVQGLGENVTIESVADYFKQIGIIKTNKKTGQPMINLYTDRETGKLKGEATVSFDDPPSAKAAIDWFDGKEFSGNPIKVSFATRRADFNRGGGNGRGGRGRGGPMGRGGYGGGGSGGGGRGGFPSGGGGGGGQQRAGDWKCPNPTCENMNFSWRNECNQCKAPKPDGPGGGPGGSHMGGNYGDDRRGGRGGAIAGKPIPNPLLGLDSTGAPGSAGSAAGSGACPVPLQLPPLERLTLDDKKPLNTLISATGLWMSRTGTIHKIKHHEVSRSKIYIEMACGDHLVVNNSRSSRTARALRHHKYRKTCKRCRVSDEDLNKFLTKANEDQTSVKVKVVSAPTRTKKAMPKSVARAPKPLENTEAAQAQPSGSKFSPAIPVSTQESVSVPASVSTSISSISTGATASALVKGNTNPITSMSAPVQASAPALTKSQTDRLEVLLNPKDEISLNSGKPFRELESELLSRRKKDLQQIYAEERENYLGKLEREITRFFVDRGFLEIKSPILIPLEYIERMGIDNDTELSKQIFRVDKNFCLRPMLAPNLANYLRKLDRALPDPIKIFEIGPCYRKESDGKEHLEEFTMLNFCQMGSGCTRENLESIITDFLNHLGIDFKIVGDSCMVFGDTLDVMHGDLELSSAVVGPIPLDREWGIDKPWIGAGFGLERLLKVKHDFKNIKRAARSESYYNGISTNL

SEQ ID NO: 103 - DNA, 3099 bp, Artificial Sequence
  Description of Artificial Sequence: Synthetic polynucleotide
  TOMM20-FUS-PylRS AA
  CDS (1)..(3099)
atggtgggtcggaacagcgccatcgccgccggtgtatgcggggcccttttcattgggtactgcatctacttcgaccgcaaaagacgaagtgaccccaacttcaagaacaggcttcgagaacgaagaaagaaacagaagcttgccaaggagagagctgggctttccaagttacctgaccttaaagatgctgaagctgttcagaagttcttcatggcctcaaacgattatacccaacaagcaacccaaagctatggggcctaccccacccagcccgggcagggctattcccagcagagcagtcagccctacggacagcagagttacagtggttatagccagtccacggacacttcaggatatggccagagcagctattcttcttatggccagagccagaacacaggctatggaactcagtcaactccccagggatatggctcgactggcggctatggcagtagccagagctcccaatcgtcttacgggcagcagtcctcctaccctggctatggccagcagccagctcccagcagcacctcgggaagttacggtagcagttctcagagcagcagctatgggcagccccagagtgggagctacagccagcagcctagctatggtggacagcagcaaagctatggacagcagcaaagctataatccccctcagggctatggacagcagaaccagtacaacagcagcagtggtggtggaggtggaggtggaggtggaggtaactatggccaagatcaatcctccatgagtagtggtggtggcagtggtggcggttatggcaatcaagaccagagtggtggaggtggcagcggtggctatggacagcaggaccgtggaggccgcggcaggggtggcagtggtggcggcggcggcggcggcggtggtggttacaaccgcagcagtggtggctatgaacccagaggtcgtggaggtggccgtggaggcagaggtggcatgggcggaagtgaccgtggtggcttcaataaatttggtggccctcgggaccaaggatcacgtcatgactccgaacaggataattcagacaacaacaccatctttgtgcaaggcctgggtgagaatgttacaattgagtctgtggctgattacttcaagcagattggtattattaagacaaacaagaaaacgggacagcccatgattaatttgtacacagacagggaaactggcaagctgaagggagaggcaacggtctcttttgatgacccaccttcagctaaagcagctattgactggtttgatggtaaagaattctccggaaatcctatcaaggtctcatttgctactcgccgggcagactttaatcggggtggtggcaatggtcgtggaggccgagggcgaggaggacccatgggccgtggaggctatggaggtggtggcagtggtggtggtggccgaggaggatttcccagtggaggtggtggcggtggaggacagcagcgagctggtgactggaagtgtcctaatcccacctgtgagaatatgaacttctcttggaggaatgaatgcaaccagtgtaaggcccctaaaccagatggcccaggagggggaccaggtggctctcacatggggggtaactacggggatgatcgtcgtggtggcagaggaggcggcgcccccggctccgccggctccgccgccggctccggcatggcgtgcccggtgccgctgcagctgccgccgctggaacgcctgaccctggatgacaaaaaaccgctgaataccctgatctctgctactggtctgtggatgagtcgtaccggaaccattcataaaatcaaacaccacgaggttagccgttcgaaaatctatattgagatggcgtgtggcgatcatctggttgtgaacaatagccgctcttctcgtacagcacgtgcactgcgtcaccacaaatatcgtaaaacctgtaaacgttgccgtgtgtccgatgaggatctgaacaaattcctgacaaaagccaatgaggaccaaacaagcgtgaaagtgaaagtcgttagcgctcctacccgtactaaaaaagcaatgccgaaatccgttgctcgtgcccctaaaccactggaaaacactgaagcagcacaggcacagccgtctggaagcaaattctctccggccattcctgtttctacccaggagtccgtttctgttccagcaagtgtgagcaccagcattagcagtattagcaccggtgccaccgctagcgccctggttaaaggcaataccaatccgattacaagcatgtctgccccggttcaagcatcagctccagcactgacaaaatcccaaaccgatcgtctggaggttctgctgaatccgaaagacgaaatcagcctgaattccggcaaaccgtttcgtgaactggagagcgaactgctgtcacgtcgtaaaaaagacctgcaacaaatctatgccgaagaacgtgagaactatctggggaaactggaacgtgaaatcacccgctttttcgtggatcgtggctttctggagatcaaatccccgattctgattcctctggagtatatcgagcgtatgggcatcgacaatgataccgaactgagcaaacaaattttccgtgtggataaaaacttctgtctgcgccctatgctggcaccaaatctgtataactatctgcgcaaactggaccgtgccctgcctgatcctatcaaaatcttcgagatcggcccgtgttatcgtaaagagtccgacggtaaagaacatctggaggagtttaccatgctggcctttgcccaaatgggttcaggttgtactcgtgagaacctggaaagcatcatcaccgattttctgaaccacctgggcattgacttcaaaattgtgggcgacagctgtatggtgtatggcgacaccctggatgtcatgcacggcgacctggaactgtctagtgccgttgttggaccaattccgctggaccgtgagtggggtatcgacaaaccgtggatcggagcaggattcggtctggaacgcctgctgaaagtgaaacacgacttcaaaaacatcaaacgtgccgcccgttctgaatcgtattataacgggatctctacgaacctgtaa

SEQ ID NO: 104 - protein, 1032 aa, Artificial Sequence
  Description of Artificial Sequence: Synthetic polypeptide
  TOMM20-FUS-PylRS AA
MVGRNSAIAAGVCGALFIGYCIYFDRKRRSDPNFKNRLRERRKKQKLAKERAGLSKLPDLKDAEAVQKFFMASNDYTQQATQSYGAYPTQPGQGYSQQSSQPYGQQSYSGYSQSTDTSGYGQSSYSSYGQSQNTGYGTQSTPQGYGSTGGYGSSQSSQSSYGQQSSYPGYGQQPAPSSTSGSYGSSSQSSSYGQPQSGSYSQQPSYGGQQQSYGQQQSYNPPQGYGQQNQYNSSSGGGGGGGGGGNYGQDQSSMSSGGGSGGGYGNQDQSGGGGSGGYGQQDRGGRGRGGSGGGGGGGGGGYNRSSGGYEPRGRGGGRGGRGGMGGSDRGGFNKFGGPRDQGSRHDSEQDNSDNNTIFVQGLGENVTIESVADYFKQIGIIKTNKKTGQPMINLYTDRETGKLKGEATVSFDDPPSAKAAIDWFDGKEFSGNPIKVSFATRRADFNRGGGNGRGGRGRGGPMGRGGYGGGGSGGGGRGGFPSGGGGGGGQQRAGDWKCPNPTCENMNFSWRNECNQCKAPKPDGPGGGPGGSHMGGNYGDDRRGGRGGGAPGSAGSAAGSGMACPVPLQLPPLERLTLDDKKPLNTLISATGLWMSRTGTIHKIKHHEVSRSKIYIEMACGDHLVVNNSRSSRTARALRHHKYRKTCKRCRVSDEDLNKFLTKANEDQTSVKVKVVSAPTRTKKAMPKSVARAPKPLENTEAAQAQPSGSKFSPAIPVSTQESVSVPASVSTSISSISTGATASALVKGNTNPITSMSAPVQASAPALTKSQTDRLEVLLNPKDEISLNSGKPFRELESELLSRRKKDLQQIYAEERENYLGKLEREITRFFVDRGFLEIKSPILIPLEYIERMGIDNDTELSKQIFRVDKNFCLRPMLAPNLYNYLRKLDRALPDPIKIFEIGPCYRKESDGKEHLEEFTMLAFAQMGSGCTRENLESIITDFLNHLGIDFKIVGDSCMVYGDTLDVMHGDLELSSAVVGPIPLDREWGIDKPWIGAGFGLERLLKVKHDFKNIKRAARSESYYNGISTNL

SEQ ID NO: 105 - DNA, 3147 bp, Artificial Sequence
  Description of Artificial Sequence: Synthetic polynucleotide
  TOMM20-FUS-V5-PylRS AA
  CDS (1)..(3147)
atggtgggtcggaacagcgccatcgccgccggtgtatgcggggcccttttcattgggtactgcatctacttcgaccgcaaaagacgaagtgaccccaacttcaagaacaggcttcgagaacgaagaaagaaacagaagcttgccaaggagagagctgggctttccaagttacctgaccttaaagatgctgaagctgttcagaaattcttcatggcctcaaacgattatacccaacaagcaacccaaagctatggggcctaccccacccagcccgggcagggctattcccagcagagcagtcagccctacggacagcagagttacagtggttatagccagtccacggacacttcaggatatggccagagcagctattcttcttatggccagagccagaacacaggctatggaactcagtcaactccccagggatatggctcgactggcggctatggcagtagccagagctcccaatcgtcttacgggcagcagtcctcctaccctggctatggccagcagccagctcccagcaacacctcgggaagttacggtagcagttctcagagcagcagctatgggcagccccagagtgggagctacagccagcagcctagctatggtggacagcagcaaagctatggacagcagcaaagctataatccccctcagggctatggacagcagaaccagtacaacagcagcagtggtggtggaggtggaggtggaggtggaggtaactatggccaagatcaatcctccatgagtagtggtggtggcagtggtggcggttatggcaatcaagaccagagtggtggaggtggcagcggtggctatggacagcaggaccgtggaggccgcggcaggggtggcagtggtggcggcggcggcggcggcggtggtggttacaaccgcagcagtggtggctatgaacccagaggtcgtggaggtggccgtggaggcagaggtggcatgggcggaagtgaccgtggtggcttcaataaatttggtggccctcgggaccaaggatcacgtcatgactccgaacaggataattcagacaacaacaccatctttgtgcaaggcctgggtgagaatgttacaattgagtctgtggctgattacttcaagcagattggtattattaagacaaacaagaaaacgggacagcccatgattaatttgtacacagacagggaaactggcaagctgaagggagaggcaacggtctcttttgatgacccaccttcagctaaagcagctattgactggtttgatggtaaagaattctccggaaatcctatcaaggtctcatttgctactcgccgggcagactttaatcggggtggtggcaatggtcgtggaggccgagggcgaggaggacccatgggccgtggaggctatggaggtggtggcagtggtggtggtggccgaggaggatttcccagtggaggtggtggcggtggaggacagcagcgagctggtgactggaagtgtcctaatcccacctgtgagaatatgaacttctcttggaggaatgaatgcaaccagtgtaaggcccctaaaccagatggcccaggagggggaccaggtggctctcacatggggggtaactacggggatgatcgtcgtggtggcagaggaggcgcgatcgcaggcaagcctattcccaaccccctgctgggcctggatagcaccggagcaccaggaagtgctggttctgctgctggtagtggagcgtgcccggtgccgctgcagctgccgccgctggaacgcctgaccctggatgacaaaaaaccgctgaataccctgatctctgctactggtctgtggatgagtcgtaccggaaccattcataaaatcaaacaccacgaggttagccgttcgaaaatctatattgagatggcgtgtggcgatcatctggttgtgaacaatagccgctcttctcgtacagcacgtgcactgcgtcaccacaaatatcgtaaaacctgtaaacgttgccgtgtgtccgatgaggatctgaacaaattcctgacaaaagccaatgaggaccaaacaagcgtgaaagtgaaagtcgttagcgctcctacccgtactaaaaaagcaatgccgaaatccgttgctcgtgcccctaaaccactggaaaacactgaagcagcacaggcacagccgtctggaagcaaattctctccggccattcctgtttctacccaggagtccgtttctgttccagcaagtgtgagcaccagcattagcagtattagcaccggtgccaccgctagcgccctggttaaaggcaataccaatccgattacaagcatgtctgccccggttcaagcatcagctccagcactgacaaaatcccaaaccgatcgtctggaggttctgctgaatccgaaagacgaaatcagcctgaattccggcaaaccgtttcgtgaactggagagcgaactgctgtcacgtcgtaaaaaagacctgcaacaaatctatgccgaagaacgtgagaactatctggggaaactggaacgtgaaatcacccgctttttcgtggatcgtggctttctggagatcaaatccccgattctgattcctctggagtatatcgagcgtatgggcatcgacaatgataccgaactgagcaaacaaattttccgtgtggataaaaacttctgtctgcgccctatgctggcaccaaatctgtataactatctgcgcaaactggaccgtgccctgcctgatcctatcaaaatcttcgagatcggcccgtgttatcgtaaagagtccgacggtaaagaacatctggaggagtttaccatgctggcctttgcccaaatgggttcaggttgtactcgtgagaacctggaaagcatcatcaccgattttctgaaccacctgggcattgacttcaaaattgtgggcgacagctgtatggtgtatggcgacaccctggatgtcatgcacggcgacctggaactgtctagtgccgttgttggaccaattccgctggaccgtgagtggggtatcgacaaaccgtggatcggagcaggattcggtctggaacgcctgctgaaagtgaaacacgacttcaaaaacatcaaacgtgccgcccgttctgaatcgtattataacgggatctctacgaacctgtaa

SEQ ID NO: 106 - protein, 1048 aa, Artificial Sequence
  Description of Artificial Sequence: Synthetic polypeptide
  TOMM20-FUS-V5-PylRS AA
MVGRNSAIAAGVCGALFIGYCIYFDRKRRSDPNFKNRLRERRKKQKLAKERAGLSKLPDLKDAEAVQKFFMASNDYTQQATQSYGAYPTQPGQGYSQQSSQPYGQQSYSGYSQSTDTSGYGQSSYSSYGQSQNTGYGTQSTPQGYGSTGGYGSSQSSQSSYGQQSSYPGYGQQPAPSNTSGSYGSSSQSSSYGQPQSGSYSQQPSYGGQQQSYGQQQSYNPPQGYGQQNQYNSSSGGGGGGGGGGNYGQDQSSMSSGGGSGGGYGNQDQSGGGGSGGYGQQDRGGRGRGGSGGGGGGGGGGYNRSSGGYEPRGRGGGRGGRGGMGGSDRGGFNKFGGPRDQGSRHDSEQDNSDNNTIFVQGLGENVTIESVADYFKQIGIIKTNKKTGQPMINLYTDRETGKLKGEATVSFDDPPSAKAAIDWFDGKEFSGNPIKVSFATRRADFNRGGGNGRGGRGRGGPMGRGGYGGGGSGGGGRGGFPSGGGGGGGQQRAGDWKCPNPTCENMNFSWRNECNQCKAPKPDGPGGGPGGSHMGGNYGDDRRGGRGGAIAGKPIPNPLLGLDSTGAPGSAGSAAGSGACPVPLQLPPLERLTLDDKKPLNTLISATGLWMSRTGTIHKIKHHEVSRSKIYIEMACGDHLVVNNSRSSRTARALRHHKYRKTCKRCRVSDEDLNKFLTKANEDQTSVKVKVVSAPTRTKKAMPKSVARAPKPLENTEAAQAQPSGSKFSPAIPVSTQESVSVPASVSTSISSISTGATASALVKGNTNPITSMSAPVQASAPALTKSQTDRLEVLLNPKDEISLNSGKPFRELESELLSRRKKDLQQIYAEERENYLGKLEREITRFFVDRGFLEIKSPILIPLEYIERMGIDNDTELSKQIFRVDKNFCLRPMLAPNLYNYLRKLDRALPDPIKIFEIGPCYRKESDGKEHLEEFTMLAFAQMGSGCTRENLESIITDFLNHLGIDFKIVGDSCMVYGDTLDVMHGDLELSSAVVGPIPLDREWGIDKPWIGAGFGLERLLKVKHDFKNIKRAARSESYYNGISTNL

SEQ ID NO: 107 - DNA, 3126 bp, Artificial Sequence
  Description of Artificial Sequence: Synthetic polynucleotide
  TOMM20-FUS-PylRS AAAF
  CDS (1)..(3126)
atggtgggtcggaacagcgccatcgccgccggtgtatgcggggcccttttcattgggtactgcatctacttcgaccgcaaaagacgaagtgaccccaacttcaagaacaggcttcgagaacgaagaaagaaacagaagcttgccaaggagagagctgggctttccaagttacctgaccttaaagatgctgaagctgttcagaaattcttcatggcctcaaacgattatacccaacaagcaacccaaagctatggggcctaccccacccagcccgggcagggctattcccagcagagcagtcagccctacggacagcagagttacagtggttatagccagtccacggacacttcaggatatggccagagcagctattcttcttatggccagagccagaacacaggctatggaactcagtcaactccccagggatatggctcgactggcggctatggcagtagccagagctcccaatcgtcttacgggcagcagtcctcctaccctggctatggccagcagccagctcccagcaacacctcgggaagttacggtagcagttctcagagcagcagctatgggcagccccagagtgggagctacagccagcagcctagctatggtggacagcagcaaagctatggacagcagcaaagctataatccccctcagggctatggacagcagaaccagtacaacagcagcagtggtggtggaggtggaggtggaggtggaggtaactatggccaagatcaatcctccatgagtagtggtggtggcagtggtggcggttatggcaatcaagaccagagtggtggaggtggcagcggtggctatggacagcaggaccgtggaggccgcggcaggggtggcagtggtggcggcggcggcggcggcggtggtggttacaaccgcagcagtggtggctatgaacccagaggtcgtggaggtggccgtggaggcagaggtggcatgggcggaagtgaccgtggtggcttcaataaatttggtggccctcgggaccaaggatcacgtcatgactccgaacaggataattcagacaacaacaccatctttgtgcaaggcctgggtgagaatgttacaattgagtctgtggctgattacttcaagcagattggtattattaagacaaacaagaaaacgggacagcccatgattaatttgtacacagacagggaaactggcaagctgaagggagaggcaacggtctcttttgatgacccaccttcagctaaagcagctattgactggtttgatggtaaagaattctccggaaatcctatcaaggtctcatttgctactcgccgggcagactttaatcggggtggtggcaatggtcgtggaggccgagggcgaggaggacccatgggccgtggaggctatggaggtggtggcagtggtggtggtggccgaggaggatttcccagtggaggtggtggcggtggaggacagcagcgagctggtgactggaagtgtcctaatcccacctgtgagaatatgaacttctcttggaggaatgaatgcaaccagtgtaaggcccctaaaccagatggcccaggagggggaccaggtggctctcacatggggggtaactacggggatgatcgtcgtggtggcagaggaggcgattacaaggatgacgacgataagggtaccggcgcccccggctccgccggctccgccgccggctccggcgcgtgcccggtgccgctgcagctgccgccgctggaacgcctgaccctggatgataaaaaaccgctgaataccctgatctctgctactggtctgtggatgagtcgtaccggaaccattcataaaatcaaacaccacgaggttagccgttcgaaaatctatattgagatggcgtgtggcgatcatctggttgtgaacaatagccgctcttctcgtacagcacgtgcactgcgtcaccacaaatatcgtaaaacctgtaaacgttgccgtgtgtccgatgaggatctgaacaaattcctgacaaaagccaatgaggaccaaacaagcgtgaaagtgaaagtcgttagcgctcctacccgtactaaaaaagcaatgccgaaatccgttgctcgtgcccctaaaccactggaaaacactgaagcagcacaggcacagccgtctggaagcaaattctctccggccattcctgtttctacccaggagtccgtttctgttccagcaagtgtgagcaccagcattagcagtattagcaccggtgccaccgctagcgccctggttaaaggcaataccaatccgattacaagcatgtctgccccggttcaagcatcagctccagcactgacaaaatcccaaaccgatcgtctggaggttctgctgaatccgaaagacgaaatcagcctgaattccggcaaaccgtttcgtgaactggagagcgaactgctgtcacgtcgtaaaaaagacctgcaacaaatctatgccgaagaacgtgagaactatctggggaaactggaacgtgaaatcacccgctttttcgtggatcgtggctttctggagatcaaatccccgattctgattcctctggagtatatcgagcgtatgggcatcgacaatgataccgaactgagcaaacaaattttccgtgtggataaaaacttctgtctgcgccctatgctagcaccaaatctggctaactatctgcgcaaactggaccgtgccctgcctgatcctatcaaaatcttcgagatcggcccgtgttatcgtaaagagtccgacggtaaagaacatctggaggagtttaccatgctggcctttgcccaaatgggttcaggttgtactcgtgagaacctggaaagcatcatcaccgattttctgaaccacctgggcattgacttcaaaattgtgggcgacagctgtatggtgtttggcgacaccctggatgtcatgcacggcgacctggaactgtctagtgccgttgtgggcccaatcccgctggatcgtgagtggggtatcgacaaaccttggatcggtgcgggttttggtctggagcgtctgctgaaagtaaaacacgacttcaagaacatcaaacgtgctgcacgttccgagtcctattacaatggtatttctactaacctgtaa

SEQ ID NO: 108 - protein, 1041 aa, Artificial Sequence
  Description of Artificial Sequence: Synthetic polypeptide
  TOMM20-FUS-PylRS AAAF
MVGRNSAIAAGVCGALFIGYCIYFDRKRRSDPNFKNRLRERRKKQKLAKERAGLSKLPDLKDAEAVQKFFMASNDYTQQATQSYGAYPTQPGQGYSQQSSQPYGQQSYSGYSQSTDTSGYGQSSYSSYGQSQNTGYGTQSTPQGYGSTGGYGSSQSSQSSYGQQSSYPGYGQQPAPSNTSGSYGSSSQSSSYGQPQSGSYSQQPSYGGQQQSYGQQQSYNPPQGYGQQNQYNSSSGGGGGGGGGGNYGQDQSSMSSGGGSGGGYGNQDQSGGGGSGGYGQQDRGGRGRGGSGGGGGGGGGGYNRSSGGYEPRGRGGGRGGRGGMGGSDRGGFNKFGGPRDQGSRHDSEQDNSDNNTIFVQGLGENVTIESVADYFKQIGIIKTNKKTGQPMINLYTDRETGKLKGEATVSFDDPPSAKAAIDWFDGKEFSGNPIKVSFATRRADFNRGGGNGRGGRGRGGPMGRGGYGGGGSGGGGRGGFPSGGGGGGGQQRAGDWKCPNPTCENMNFSWRNECNQCKAPKPDGPGGGPGGSHMGGNYGDDRRGGRGGDYKDDDDKGTGAPGSAGSAAGSGACPVPLQLPPLERLTLDDKKPLNTLISATGLWMSRTGTIHKIKHHEVSRSKIYIEMACGDHLVVNNSRSSRTARALRHHKYRKTCKRCRVSDEDLNKFLTKANEDQTSVKVKVVSAPTRTKKAMPKSVARAPKPLENTEAAQAQPSGSKFSPAIPVSTQESVSVPASVSTSISSISTGATASALVKGNTNPITSMSAPVQASAPALTKSQTDRLEVLLNPKDEISLNSGKPFRELESELLSRRKKDLQQIYAEERENYLGKLEREITRFFVDRGFLEIKSPILIPLEYIERMGIDNDTELSKQIFRVDKNFCLRPMLAPNLANYLRKLDRALPDPIKIFEIGPCYRKESDGKEHLEEFTMLAFAQMGSGCTRENLESIITDFLNHLGIDFKIVGDSCMVFGDTLDVMHGDLELSSAVVGPIPLDREWGIDKPWIGAGFGLERLLKVKHDFKNIKRAARSESYYNGISTNL

SEQ ID NO: 109 - DNA, 3147 bp, Artificial Sequence
  Description of Artificial Sequence: Synthetic polynucleotide
  TOMM20-FUS-V5-PylRS AAAF
  CDS (1)..(3147)
atggtgggtcggaacagcgccatcgccgccggtgtatgcggggcccttttcattgggtactgcatctacttcgaccgcaaaagacgaagtgaccccaacttcaagaacaggcttcgagaacgaagaaagaaacagaagcttgccaaggagagagctgggctttccaagttacctgaccttaaagatgctgaagctgttcagaaattcttcatggcctcaaacgattatacccaacaagcaacccaaagctatggggcctaccccacccagcccgggcagggctattcccagcagagcagtcagccctacggacagcagagttacagtggttatagccagtccacggacacttcaggatatggccagagcagctattcttcttatggccagagccagaacacaggctatggaactcagtcaactccccagggatatggctcgactggcggctatggcagtagccagagctcccaatcgtcttacgggcagcagtcctcctaccctggctatggccagcagccagctcccagcaacacctcgggaagttacggtagcagttctcagagcagcagctatgggcagccccagagtgggagctacagccagcagcctagctatggtggacagcagcaaagctatggacagcagcaaagctataatccccctcagggctatggacagcagaaccagtacaacagcagcagtggtggtggaggtggaggtggaggtggaggtaactatggccaagatcaatcctccatgagtagtggtggtggcagtggtggcggttatggcaatcaagaccagagtggtggaggtggcagcggtggctatggacagcaggaccgtggaggccgcggcaggggtggcagtggtggcggcggcggcggcggcggtggtggttacaaccgcagcagtggtggctatgaacccagaggtcgtggaggtggccgtggaggcagaggtggcatgggcggaagtgaccgtggtggcttcaataaatttggtggccctcgggaccaaggatcacgtcatgactccgaacaggataattcagacaacaacaccatctttgtgcaaggcctgggtgagaatgttacaattgagtctgtggctgattacttcaagcagattggtattattaagacaaacaagaaaacgggacagcccatgattaatttgtacacagacagggaaactggcaagctgaagggagaggcaacggtctcttttgatgacccaccttcagctaaagcagctattgactggtttgatggtaaagaattctccggaaatcctatcaaggtctcatttgctactcgccgggcagactttaatcggggtggtggcaatggtcgtggaggccgagggcgaggaggacccatgggccgtggaggctatggaggtggtggcagtggtggtggtggccgaggaggatttcccagtggaggtggtggcggtggaggacagcagcgagctggtgactggaagtgtcctaatcccacctgtgagaatatgaacttctcttggaggaatgaatgcaaccagtgtaaggcccctaaaccagatggcccaggagggggaccaggtggctctcacatggggggtaactacggggatgatcgtcgtggtggcagaggaggcgcgatcgcaggcaagcctattcccaaccccctgctgggcctggatagcaccggagcaccaggaagtgctggttctgctgctggtagtggagcgtgcccggtgccgctgcagctgccgccgctggaacgcctgaccctggatgataaaaaaccgctgaataccctgatctctgctactggtctgtggatgagtcgtaccggaaccattcataaaatcaaacaccacgaggttagccgttcgaaaatctatattgagatggcgtgtggcgatcatctggttgtgaacaatagccgctcttctcgtacagcacgtgcactgcgtcaccacaaatatcgtaaaacctgtaaacgttgccgtgtgtccgatgaggatctgaacaaattcctgacaaaagccaatgaggaccaaacaagcgtgaaagtgaaagtcgttagcgctcctacccgtactaaaaaagcaatgccgaaatccgttgctcgtgcccctaaaccactggaaaacactgaagcagcacaggcacagccgtctggaagcaaattctctccggccattcctgtttctacccaggagtccgtttctgttccagcaagtgtgagcaccagcattagcagtattagcaccggtgccaccgctagcgccctggttaaaggcaataccaatccgattacaagcatgtctgccccggttcaagcatcagctccagcactgacaaaatcccaaaccgatcgtctggaggttctgctgaatccgaaagacgaaatcagcctgaattccggcaaaccgtttcgtgaactggagagcgaactgctgtcacgtcgtaaaaaagacctgcaacaaatctatgccgaagaacgtgagaactatctggggaaactggaacgtgaaatcacccgctttttcgtggatcgtggctttctggagatcaaatccccgattctgattcctctggagtatatcgagcgtatgggcatcgacaatgataccgaactgagcaaacaaattttccgtgtggataaaaacttctgtctgcgccctatgctagcaccaaatctggctaactatctgcgcaaactggaccgtgccctgcctgatcctatcaaaatcttcgagatcggcccgtgttatcgtaaagagtccgacggtaaagaacatctggaggagtttaccatgctggcctttgcccaaatgggttcaggttgtactcgtgagaacctggaaagcatcatcaccgattttctgaaccacctgggcattgacttcaaaattgtgggcgacagctgtatggtgtttggcgacaccctggatgtcatgcacggcgacctggaactgtctagtgccgttgtgggcccaatcccgctggatcgtgagtggggtatcgacaaaccttggatcggtgcgggttttggtctggagcgtctgctgaaagtaaaacacgacttcaagaacatcaaacgtgctgcacgttccgagtcctattacaatggtatttctactaacctgtaa

SEQ ID NO: 110 - protein, 1048 aa, Artificial Sequence
  Description of Artificial Sequence: Synthetic polypeptide
  TOMM20-FUS-V5-PylRS AAAF
MVGRNSAIAAGVCGALFIGYCIYFDRKRRSDPNFKNRLRERRKKQKLAKERAGLSKLPDLKDAEAVQKFFMASNDYTQQATQSYGAYPTQPGQGYSQQSSQPYGQQSYSGYSQSTDTSGYGQSSYSSYGQSQNTGYGTQSTPQGYGSTGGYGSSQSSQSSYGQQSSYPGYGQQPAPSNTSGSYGSSSQSSSYGQPQSGSYSQQPSYGGQQQSYGQQQSYNPPQGYGQQNQYNSSSGGGGGGGGGGNYGQDQSSMSSGGGSGGGYGNQDQSGGGGSGGYGQQDRGGRGRGGSGGGGGGGGGGYNRSSGGYEPRGRGGGRGGRGGMGGSDRGGFNKFGGPRDQGSRHDSEQDNSDNNTIFVQGLGENVTIESVADYFKQIGIIKTNKKTGQPMINLYTDRETGKLKGEATVSFDDPPSAKAAIDWFDGKEFSGNPIKVSFATRRADFNRGGGNGRGGRGRGGPMGRGGYGGGGSGGGGRGGFPSGGGGGGGQQRAGDWKCPNPTCENMNFSWRNECNQCKAPKPDGPGGGPGGSHMGGNYGDDRRGGRGGAIAGKPIPNPLLGLDSTGAPGSAGSAAGSGACPVPLQLPPLERLTLDDKKPLNTLISATGLWMSRTGTIHKIKHHEVSRSKIYIEMACGDHLVVNNSRSSRTARALRHHKYRKTCKRCRVSDEDLNKFLTKANEDQTSVKVKVVSAPTRTKKAMPKSVARAPKPLENTEAAQAQPSGSKFSPAIPVSTQESVSVPASVSTSISSISTGATASALVKGNTNPITSMSAPVQASAPALTKSQTDRLEVLLNPKDEISLNSGKPFRELESELLSRRKKDLQQIYAEERENYLGKLEREITRFFVDRGFLEIKSPILIPLEYIERMGIDNDTELSKQIFRVDKNFCLRPMLAPNLANYLRKLDRALPDPIKIFEIGPCYRKESDGKEHLEEFTMLAFAQMGSGCTRENLESIITDFLNHLGIDFKIVGDSCMVFGDTLDVMHGDLELSSAVVGPIPLDREWGIDKPWIGAGFGLERLLKVKHDFKNIKRAARSESYYNGISTNL

SEQ ID NO: 111 - DNA, 2664 bp, Artificial Sequence
  Description of Artificial Sequence: Synthetic polynucleotide
  TOMM20-EWSR1- Lambda N22
  CDS (1)..(2664)
atggtgggtcggaacagcgccatcgccgccggtgtatgcggggcccttttcattgggtactgcatctacttcgaccgcaaaagacgaagtgaccccaacttcaagaacaggcttcgagaacgaagaaagaaacagaagcttgccaaggagagagctgggctttccaagttacctgaccttaaagatgctgaagctgttcagaagttcttcatggcgtccacggattacagtacctatagccaagctgcagcgcagcagggctacagtgcttacaccgcccagcccactcaaggatatgcacagaccacccaggcatatgggcaacaaagctatggaacctatggacagcccactgatgtcagctatacccaggctcagaccactgcaacctatgggcagaccgcctatgcaacttcttatggacagcctcccactggttatactactccaactgccccccaggcatacagccagcctgtccaggggtatggcactggtgcttatgataccaccactgctacagtcaccaccacccaggcctcctatgcagctcagtctgcatatggcactcagcctgcttatccagcctatgggcagcagccagcagccactgcacctacaagaccgcaggatggaaacaagcccactgagactagtcaacctcaatctagcacagggggttacaaccagcccagcctaggatatggacagagtaactacagttatccccaggtacctgggagctaccccatgcagccagtcactgcacctccatcctaccctcctaccagctattcctctacacagccgactagttatgatcagagcagttactctcagcagaacacctatgggcaaccgagcagctatggacagcagagtagctatggtcaacaaagcagctatgggcagcagcctcccactagttacccaccccaaactggatcctacagccaagctccaagtcaatatagccaacagagcagcagctacgggcagcagagttcattccgacaggaccaccccagtagcatgggtgtttatgggcaggagtctggaggattttccggaccaggagagaaccggagcatgagtggccctgataaccggggcaggggaagagggggatttgatcgtggaggcatgagcagaggtgggcggggaggaggacgcggtggaatgggcagcgctggagagcgaggtggcttcaataagcctggtggacccatggatgaaggaccagatcttgatctaggcccacctgtagatccagatgaagactctgacaacagtgcaatttatgtacaaggattaaatgacagtgtgactctagatgatctggcagacttctttaagcagtgtggggttgttaagatgaacaagagaactgggcaacccatgatccacatctacctggacaaggaaacaggaaagcccaaaggcgatgccacagtgtcctatgaagacccacctactgccaaggctgccgtggaatggtttgatgggaaagattttcaagggagcaaacttaaagtctcccttgctcggaagaagcctccaatgaacagtatgcggggtggtctgccaccccgtgagggcagaggcatgccaccaccactccgtggaggtccaggaggcccaggaggtcctgggggacccatgggtcgcatgggaggccgtggaggagatagaggaggcttccctccaagaggaccccggggttcccgagggaacccctctggaggaggaaacgtccagcaccgagctggagactggcagtgtcccaatccgggttgtggaaaccagaacttcgcctggagaacagagtgcaaccagtgtaaggccccaaagcctgaaggcttcctcccgccaccctttccgcccccgggtggtgatcgtggcagaggtggccctggtggcatgcggggaggaagaggtggcctcatggatcgtggtggtcccggtggaatgttcagaggtggccgtggtggagacagaggtggcttccgtggtggccggggcatggaccgaggtggctttggtggaggaagacgaggtggccctggggggccccctggacctttgatggaacaggcgatcgcaggagcaccaggaagtgctggttctgctgctggtagtggagagcagaagctgatctcagaggaggacctgctagccaccatggacgcacaaacacgacgacgtgagcgtcgcgctgagaaacaagctcaatggaaagctgcaaacccaccgctcgacggagccggagctggcgctggagctggagccggagctggcggtctagccaccatggacgcacaaacacgacgacgtgagcgtcgcgctgagaaacaagctcaatggaaagctgcaaacccaccgctcgacggagccggagctggcgctggagctggagccggagctggcggtctagccaccatggacgcacaaacacgacgacgtgagcgtcgcgctgagaaacaagctcaatggaaagctgcaaacccaccgctcgacggagccggagctggcgctggagctggagccggagctggcggtctagccaccatggacgcacaaacacgacgacgtgagcgtcgcgctgagaaacaagctcaatggaaagctgcaaacccaccgctcgagtctagagggcccgtttaa

SEQ ID NO: 112 - protein, 887 aa, Artificial Sequence
  Description of Artificial Sequence: Synthetic polypeptide
  TOMM20-EWSR1- Lambda N22
MVGRNSAIAAGVCGALFIGYCIYFDRKRRSDPNFKNRLRERRKKQKLAKERAGLSKLPDLKDAEAVQKFFMASTDYSTYSQAAAQQGYSAYTAQPTQGYAQTTQAYGQQSYGTYGQPTDVSYTQAQTTATYGQTAYATSYGQPPTGYTTPTAPQAYSQPVQGYGTGAYDTTTATVTTTQASYAAQSAYGTQPAYPAYGQQPAATAPTRPQDGNKPTETSQPQSSTGGYNQPSLGYGQSNYSYPQVPGSYPMQPVTAPPSYPPTSYSSTQPTSYDQSSYSQQNTYGQPSSYGQQSSYGQQSSYGQQPPTSYPPQTGSYSQAPSQYSQQSSSYGQQSSFRQDHPSSMGVYGQESGGFSGPGENRSMSGPDNRGRGRGGFDRGGMSRGGRGGGRGGMGSAGERGGFNKPGGPMDEGPDLDLGPPVDPDEDSDNSAIYVQGLNDSVTLDDLADFFKQCGVVKMNKRTGQPMIHIYLDKETGKPKGDATVSYEDPPTAKAAVEWFDGKDFQGSKLKVSLARKKPPMNSMRGGLPPREGRGMPPPLRGGPGGPGGPGGPMGRMGGRGGDRGGFPPRGPRGSRGNPSGGGNVQHRAGDWQCPNPGCGNQNFAWRTECNQCKAPKPEGFLPPPFPPPGGDRGRGGPGGMRGGRGGLMDRGGPGGMFRGGRGGDRGGFRGGRGMDRGGFGGGRRGGPGGPPGPLMEQAIAGAPGSAGSAAGSGEQKLISEEDLLATMDAQTRRRERRAEKQAQWKAANPPLDGAGAGAGAGAGAGGLATMDAQTRRRERRAEKQAQWKAANPPLDGAGAGAGAGAGAGGLATMDAQTRRRERRAEKQAQWKAANPPLDGAGAGAGAGAGAGGLATMDAQTRRRERRAEKQAQWKAANPPLESRGPV

SEQ ID NO: 113 - DNA, 2664 bp, Artificial Sequence; identical to SEQ ID NO: 111
  Description of Artificial Sequence: Synthetic polynucleotide
  TOMM20-EWSR1-Myc-LabmdaN22
  CDS (1)..(2664)

SEQ ID NO: 114 - protein, 887 aa, Artificial Sequence; identical to SEQ ID NO: 112
  Description of Artificial Sequence: Synthetic polypeptide
  TOMM20-EWSR1-Myc-LabmdaN22

SEQ ID NO: 115 - DNA, 2892 bp, Artificial Sequence
  Description of Artificial Sequence: Synthetic polynucleotide
  TOMM20-3xMCP-PylRS AF
  CDS (1)..(2892)
atggtgggtcggaacagcgccatcgccgccggtgtatgcggggcccttttcattgggtactgcatctacttcgaccgcaaaagacgaagtgaccccaacttcaagaacaggcttcgagaacgaagaaagaaacagaagcttgccaaggagagagctgggctttccaagttacctgaccttaaagatgctgaagctgttcagaagttcttctatacagatattgaaatgaacagattgggaaaggagcagaagctgatctcagaggaggacctgggcgcccccggctccgccggctccgccgccggctccggcgcttctaactttactcagttcgttctcgtcgacaatggcggaactggcgacgtgactgtcgccccaagcaacttcgctaacgggatcgctgaatggatcagctctaactcgcgttcacaggcttacaaagtaacctgtagcgttcgtcagagctctgcgcagaatcgcaaatacaccatcaaagtcgaggtgcctaaaggcgcctggcgttcgtacttaaatatggaactaaccattccaattttcgccacgaattccgactgcgagcttattgttaaggcaatgcaaggtctcctaaaagatggaaacccgattccctcagcaatcgcagcaaactccggcatctacggtgccccaggctccgcaggaagcgcagcggggtccggagcttctaactttactcagttcgttctcgtcgacaatggcggaactggcgacgtgactgtcgccccaagcaacttcgctaacgggatcgctgaatggatcagctctaactcgcgttcacaggcttacaaagtaacctgtagcgttcgtcagagctctgcgcagaatcgcaaatacaccatcaaagtcgaggtgcctaaaggcgcctggcgttcgtacttaaatatggaactaaccattccaattttcgccacgaattccgactgcgagcttattgttaaggcaatgcaaggtctcctaaaagatggaaacccgattccctcagcaatcgcagcaaactccggcatctacggcgcacctggtagtgctggttctgctgctggatcaggtgcttctaactttactcagttcgttctcgtcgacaatggcggaactggcgacgtgactgtcgccccaagcaacttcgctaacgggatcgctgaatggatcagctctaactcgcgttcacaggcttacaaagtaacctgtagcgttcgtcagagctctgcgcagaatcgcaaatacaccatcaaagtcgaggtgcctaaaggcgcctggcgttcgtacttaaatatggaactaaccattccaattttcgccacgaattccgactgcgagcttattgttaaggcaatgcaaggtctcctaaaagatggaaacccgattccctcagcaatcgcagcaaactccggcatctacggtaccggcgcccccggctccgccggctccgccgccggctccggcgcgtgcccggtgccgctgcagctgccgccgctggaacgcctgaccctggatgataaaaaaccgctgaataccctgatctctgctactggtctgtggatgagtcgtaccggaaccattcataaaatcaaacaccacgaggttagccgttcgaaaatctatattgagatggcgtgtggcgatcatctggttgtgaacaatagccgctcttctcgtacagcacgtgcactgcgtcaccacaaatatcgtaaaacctgtaaacgttgccgtgtgtccgatgaggatctgaacaaattcctgacaaaagccaatgaggaccaaacaagcgtgaaagtgaaagtcgttagcgctcctacccgtactaaaaaagcaatgccgaaatccgttgctcgtgcccctaaaccactggaaaacactgaagcagcacaggcacagccgtctggaagcaaattctctccggccattcctgtttctacccaggagtccgtttctgttccagcaagtgtgagcaccagcattagcagtattagcaccggtgccaccgctagcgccctggttaaaggcaataccaatccgattacaagcatgtctgccccggttcaagcatcagctccagcactgacaaaatcccaaaccgatcgtctggaggttctgctgaatccgaaagacgaaatcagcctgaattccggcaaaccgtttcgtgaactggagagcgaactgctgtcacgtcgtaaaaaagacctgcaacaaatctatgccgaagaacgtgagaactatctggggaaactggaacgtgaaatcacccgctttttcgtggatcgtggctttctggagatcaaatccccgattctgattcctctggagtatatcgagcgtatgggcatcgacaatgataccgaactgagcaaacaaattttccgtgtggataaaaacttctgtctgcgccctatgctagcaccaaatctggctaactatctgcgcaaactggaccgtgccctgcctgatcctatcaaaatcttcgagatcggcccgtgttatcgtaaagagtccgacggtaaagaacatctggaggagtttaccatgctgaacttttgccaaatgggttcaggttgtactcgtgagaacctggaaagcatcatcaccgattttctgaaccacctgggcattgacttcaaaattgtgggcgacagctgtatggtgtttggcgacaccctggatgtcatgcacggcgacctggaactgtctagtgccgttgtgggcccaatcccgctggatcgtgagtggggtatcgacaaaccttggatcggtgcgggttttggtctggagcgtctgctgaaagtaaaacacgacttcaagaacatcaaacgtgctgcacgttccgagtcctattacaatggtatttctactaacctgtaa

SEQ ID NO: 116 - protein, 963 aa, Artificial Sequence
  Description of Artificial Sequence: Synthetic polypeptide
  TOMM20-3xMCP-PylRS AF
MVGRNSAIAAGVCGALFIGYCIYFDRKRRSDPNFKNRLRERRKKQKLAKERAGLSKLPDLKDAEAVQKFFYTDIEMNRLGKEQKLISEEDLGAPGSAGSAAGSGASNFTQFVLVDNGGTGDVTVAPSNFANGIAEWISSNSRSQAYKVTCSVRQSSAQNRKYTIKVEVPKGAWRSYLNMELTIPIFATNSDCELIVKAMQGLLKDGNPIPSAIAANSGIYGAPGSAGSAAGSGASNFTQFVLVDNGGTGDVTVAPSNFANGIAEWISSNSRSQAYKVTCSVRQSSAQNRKYTIKVEVPKGAWRSYLNMELTIPIFATNSDCELIVKAMQGLLKDGNPIPSAIAANSGIYGAPGSAGSAAGSGASNFTQFVLVDNGGTGDVTVAPSNFANGIAEWISSNSRSQAYKVTCSVRQSSAQNRKYTIKVEVPKGAWRSYLNMELTIPIFATNSDCELIVKAMQGLLKDGNPIPSAIAANSGIYGTGAPGSAGSAAGSGACPVPLQLPPLERLTLDDKKPLNTLISATGLWMSRTGTIHKIKHHEVSRSKIYIEMACGDHLVVNNSRSSRTARALRHHKYRKTCKRCRVSDEDLNKFLTKANEDQTSVKVKVVSAPTRTKKAMPKSVARAPKPLENTEAAQAQPSGSKFSPAIPVSTQESVSVPASVSTSISSISTGATASALVKGNTNPITSMSAPVQASAPALTKSQTDRLEVLLNPKDEISLNSGKPFRELESELLSRRKKDLQQIYAEERENYLGKLEREITRFFVDRGFLEIKSPILIPLEYIERMGIDNDTELSKQIFRVDKNFCLRPMLAPNLANYLRKLDRALPDPIKIFEIGPCYRKESDGKEHLEEFTMLNFCQMGSGCTRENLESIITDFLNHLGIDFKIVGDSCMVFGDTLDVMHGDLELSSAVVGPIPLDREWGIDKPWIGAGFGLERLLKVKHDFKNIKRAARSESYYNGISTNL

SEQ ID NO: 117 - DNA, 4293 bp, Artificial Sequence
  Description of Artificial Sequence: Synthetic polynucleotide
  TOMM20-FUS-3xMCP-PylRS AF
  CDS (1)..(4293)
atggtgggtcggaacagcgccatcgccgccggtgtatgcggggcccttttcattgggtactgcatctacttcgaccgcaaaagacgaagtgaccccaacttcaagaacaggcttcgagaacgaagaaagaaacagaagcttgccaaggagagagctgggctttccaagttacctgaccttaaagatgctgaagctgttcagaaattcttcatggcctcaaacgattatacccaacaagcaacccaaagctatggggcctaccccacccagcccgggcagggctattcccagcagagcagtcagccctacggacagcagagttacagtggttatagccagtccacggacacttcaggatatggccagagcagctattcttcttatggccagagccagaacacaggctatggaactcagtcaactccccagggatatggctcgactggcggctatggcagtagccagagctcccaatcgtcttacgggcagcagtcctcctaccctggctatggccagcagccagctcccagcaacacctcgggaagttacggtagcagttctcagagcagcagctatgggcagccccagagtgggagctacagccagcagcctagctatggtggacagcagcaaagctatggacagcagcaaagctataatccccctcagggctatggacagcagaaccagtacaacagcagcagtggtggtggaggtggaggtggaggtggaggtaactatggccaagatcaatcctccatgagtagtggtggtggcagtggtggcggttatggcaatcaagaccagagtggtggaggtggcagcggtggctatggacagcaggaccgtggaggccgcggcaggggtggcagtggtggcggcggcggcggcggcggtggtggttacaaccgcagcagtggtggctatgaacccagaggtcgtggaggtggccgtggaggcagaggtggcatgggcggaagtgaccgtggtggcttcaataaatttggtggccctcgggaccaaggatcacgtcatgactccgaacaggataattcagacaacaacaccatctttgtgcaaggcctgggtgagaatgttacaattgagtctgtggctgattacttcaagcagattggtattattaagacaaacaagaaaacgggacagcccatgattaatttgtacacagacagggaaactggcaagctgaagggagaggcaacggtctcttttgatgacccaccttcagctaaagcagctattgactggtttgatggtaaagaattctccggaaatcctatcaaggtctcatttgctactcgccgggcagactttaatcggggtggtggcaatggtcgtggaggccgagggcgaggaggacccatgggccgtggaggctatggaggtggtggcagtggtggtggtggccgaggaggatttcccagtggaggtggtggcggtggaggacagcagcgagctggtgactggaagtgtcctaatcccacctgtgagaatatgaacttctcttggaggaatgaatgcaaccagtgtaaggcccctaaaccagatggcccaggagggggaccaggtggctctcacatggggggtaactacggggatgatcgtcgtggtggcagaggaggcgagcagaagctgatctcagaggaggacctgggcgcccccggctccgccggctccgccgccggctccggcgcttctaactttactcagttcgttctcgtcgacaatggcggaactggcgacgtgactgtcgccccaagcaacttcgctaacgggatcgctgaatggatcagctctaactcgcgttcacaggcttacaaagtaacctgtagcgttcgtcagagctctgcgcagaatcgcaaatacaccatcaaagtcgaggtgcctaaaggcgcctggcgttcgtacttaaatatggaactaaccattccaattttcgccacgaattccgactgcgagcttattgttaaggcaatgcaaggtctcctaaaagatggaaacccgattccctcagcaatcgcagcaaactccggcatctacggtgccccaggctccgcaggaagcgcagcggggtccggagcttctaactttactcagttcgttctcgtcgacaatggcggaactggcgacgtgactgtcgccccaagcaacttcgctaacgggatcgctgaatggatcagctctaactcgcgttcacaggcttacaaagtaacctgtagcgttcgtcagagctctgcgcagaatcgcaaatacaccatcaaagtcgaggtgcctaaaggcgcctggcgttcgtacttaaatatggaactaaccattccaattttcgccacgaattccgactgcgagcttattgttaaggcaatgcaaggtctcctaaaagatggaaacccgattccctcagcaatcgcagcaaactccggcatctacggcgcacctggtagtgctggttctgctgctggatcaggtgcttctaactttactcagttcgttctcgtcgacaatggcggaactggcgacgtgactgtcgccccaagcaacttcgctaacgggatcgctgaatggatcagctctaactcgcgttcacaggcttacaaagtaacctgtagcgttcgtcagagctctgcgcagaatcgcaaatacaccatcaaagtcgaggtgcctaaaggcgcctggcgttcgtacttaaatatggaactaaccattccaattttcgccacgaattccgactgcgagcttattgttaaggcaatgcaaggtctcctaaaagatggaaacccgattccctcagcaatcgcagcaaactccggcatctacggtaccggcgcccccggctccgccggctccgccgccggctccggcgcgtgcccggtgccgctgcagctgccgccgctggaacgcctgaccctggatgataaaaaaccgctgaataccctgatctctgctactggtctgtggatgagtcgtaccggaaccattcataaaatcaaacaccacgaggttagccgttcgaaaatctatattgagatggcgtgtggcgatcatctggttgtgaacaatagccgctcttctcgtacagcacgtgcactgcgtcaccacaaatatcgtaaaacctgtaaacgttgccgtgtgtccgatgaggatctgaacaaattcctgacaaaagccaatgaggaccaaacaagcgtgaaagtgaaagtcgttagcgctcctacccgtactaaaaaagcaatgccgaaatccgttgctcgtgcccctaaaccactggaaaacactgaagcagcacaggcacagccgtctggaagcaaattctctccggccattcctgtttctacccaggagtccgtttctgttccagcaagtgtgagcaccagcattagcagtattagcaccggtgccaccgctagcgccctggttaaaggcaataccaatccgattacaagcatgtctgccccggttcaagcatcagctccagcactgacaaaatcccaaaccgatcgtctggaggttctgctgaatccgaaagacgaaatcagcctgaattccggcaaaccgtttcgtgaactggagagcgaactgctgtcacgtcgtaaaaaagacctgcaacaaatctatgccgaagaacgtgagaactatctggggaaactggaacgtgaaatcacccgctttttcgtggatcgtggctttctggagatcaaatccccgattctgattcctctggagtatatcgagcgtatgggcatcgacaatgataccgaactgagcaaacaaattttccgtgtggataaaaacttctgtctgcgccctatgctagcaccaaatctggctaactatctgcgcaaactggaccgtgccctgcctgatcctatcaaaatcttcgagatcggcccgtgttatcgtaaagagtccgacggtaaagaacatctggaggagtttaccatgctgaacttttgccaaatgggttcaggttgtactcgtgagaacctggaaagcatcatcaccgattttctgaaccacctgggcattgacttcaaaattgtgggcgacagctgtatggtgtttggcgacaccctggatgtcatgcacggcgacctggaactgtctagtgccgttgtgggcccaatcccgctggatcgtgagtggggtatcgacaaaccttggatcggtgcgggttttggtctggagcgtctgctgaaagtaaaacacgacttcaagaacatcaaacgtgctgcacgttccgagtcctattacaatggtatttctactaacctgtaa

SEQ ID NO: 118 - protein, 1430 aa, Artificial Sequence
  Description of Artificial Sequence: Synthetic polypeptide
  TOMM20-FUS-3xMCP-PylRS AF
MVGRNSAIAAGVCGALFIGYCIYFDRKRRSDPNFKNRLRERRKKQKLAKERAGLSKLPDLKDAEAVQKFFMASNDYTQQATQSYGAYPTQPGQGYSQQSSQPYGQQSYSGYSQSTDTSGYGQSSYSSYGQSQNTGYGTQSTPQGYGSTGGYGSSQSSQSSYGQQSSYPGYGQQPAPSNTSGSYGSSSQSSSYGQPQSGSYSQQPSYGGQQQSYGQQQSYNPPQGYGQQNQYNSSSGGGGGGGGGGNYGQDQSSMSSGGGSGGGYGNQDQSGGGGSGGYGQQDRGGRGRGGSGGGGGGGGGGYNRSSGGYEPRGRGGGRGGRGGMGGSDRGGFNKFGGPRDQGSRHDSEQDNSDNNTIFVQGLGENVTIESVADYFKQIGIIKTNKKTGQPMINLYTDRETGKLKGEATVSFDDPPSAKAAIDWFDGKEFSGNPIKVSFATRRADFNRGGGNGRGGRGRGGPMGRGGYGGGGSGGGGRGGFPSGGGGGGGQQRAGDWKCPNPTCENMNFSWRNECNQCKAPKPDGPGGGPGGSHMGGNYGDDRRGGRGGEQKLISEEDLGAPGSAGSAAGSGASNFTQFVLVDNGGTGDVTVAPSNFANGIAEWISSNSRSQAYKVTCSVRQSSAQNRKYTIKVEVPKGAWRSYLNMELTIPIFATNSDCELIVKAMQGLLKDGNPIPSAIAANSGIYGAPGSAGSAAGSGASNFTQFVLVDNGGTGDVTVAPSNFANGIAEWISSNSRSQAYKVTCSVRQSSAQNRKYTIKVEVPKGAWRSYLNMELTIPIFATNSDCELIVKAMQGLLKDGNPIPSAIAANSGIYGAPGSAGSAAGSGASNFTQFVLVDNGGTGDVTVAPSNFANGIAEWISSNSRSQAYKVTCSVRQSSAQNRKYTIKVEVPKGAWRSYLNMELTIPIFATNSDCELIVKAMQGLLKDGNPIPSAIAANSGIYGTGAPGSAGSAAGSGACPVPLQLPPLERLTLDDKKPLNTLISATGLWMSRTGTIHKIKHHEVSRSKIYIEMACGDHLVVNNSRSSRTARALRHHKYRKTCKRCRVSDEDLNKFLTKANEDQTSVKVKVVSAPTRTKKAMPKSVARAPKPLENTEAAQAQPSGSKFSPAIPVSTQESVSVPASVSTSISSISTGATASALVKGNTNPITSMSAPVQASAPALTKSQTDRLEVLLNPKDEISLNSGKPFRELESELLSRRKKDLQQIYAEERENYLGKLEREITRFFVDRGFLEIKSPILIPLEYIERMGIDNDTELSKQIFRVDKNFCLRPMLAPNLANYLRKLDRALPDPIKIFEIGPCYRKESDGKEHLEEFTMLNFCQMGSGCTRENLESIITDFLNHLGIDFKIVGDSCMVFGDTLDVMHGDLELSSAVVGPIPLDREWGIDKPWIGAGFGLERLLKVKHDFKNIKRAARSESYYNGISTNL

SEQ ID NO: 119 - DNA, 4293 bp, Artificial Sequence
  Description of Artificial Sequence: Synthetic polynucleotide
  TOMM20-FUS-3xMCP-PylRS AAAF
  CDS (1)..(4293)
atggtgggtcggaacagcgccatcgccgccggtgtatgcggggcccttttcattgggtactgcatctacttcgaccgcaaaagacgaagtgaccccaacttcaagaacaggcttcgagaacgaagaaagaaacagaagcttgccaaggagagagctgggctttccaagttacctgaccttaaagatgctgaagctgttcagaaattcttcatggcctcaaacgattatacccaacaagcaacccaaagctatggggcctaccccacccagcccgggcagggctattcccagcagagcagtcagccctacggacagcagagttacagtggttatagccagtccacggacacttcaggatatggccagagcagctattcttcttatggccagagccagaacacaggctatggaactcagtcaactccccagggatatggctcgactggcggctatggcagtagccagagctcccaatcgtcttacgggcagcagtcctcctaccctggctatggccagcagccagctcccagcaacacctcgggaagttacggtagcagttctcagagcagcagctatgggcagccccagagtgggagctacagccagcagcctagctatggtggacagcagcaaagctatggacagcagcaaagctataatccccctcagggctatggacagcagaaccagtacaacagcagcagtggtggtggaggtggaggtggaggtggaggtaactatggccaagatcaatcctccatgagtagtggtggtggcagtggtggcggttatggcaatcaagaccagagtggtggaggtggcagcggtggctatggacagcaggaccgtggaggccgcggcaggggtggcagtggtggcggcggcggcggcggcggtggtggttacaaccgcagcagtggtggctatgaacccagaggtcgtggaggtggccgtggaggcagaggtggcatgggcggaagtgaccgtggtggcttcaataaatttggtggccctcgggaccaaggatcacgtcatgactccgaacaggataattcagacaacaacaccatctttgtgcaaggcctgggtgagaatgttacaattgagtctgtggctgattacttcaagcagattggtattattaagacaaacaagaaaacgggacagcccatgattaatttgtacacagacagggaaactggcaagctgaagggagaggcaacggtctcttttgatgacccaccttcagctaaagcagctattgactggtttgatggtaaagaattctccggaaatcctatcaaggtctcatttgctactcgccgggcagactttaatcggggtggtggcaatggtcgtggaggccgagggcgaggaggacccatgggccgtggaggctatggaggtggtggcagtggtggtggtggccgaggaggatttcccagtggaggtggtggcggtggaggacagcagcgagctggtgactggaagtgtcctaatcccacctgtgagaatatgaacttctcttggaggaatgaatgcaaccagtgtaaggcccctaaaccagatggcccaggagggggaccaggtggctctcacatggggggtaactacggggatgatcgtcgtggtggcagaggaggcgagcagaagctgatctcagaggaggacctgggcgcccccggctccgccggctccgccgccggctccggcgcttctaactttactcagttcgttctcgtcgacaatggcggaactggcgacgtgactgtcgccccaagcaacttcgctaacgggatcgctgaatggatcagctctaactcgcgttcacaggcttacaaagtaacctgtagcgttcgtcagagctctgcgcagaatcgcaaatacaccatcaaagtcgaggtgcctaaaggcgcctggcgttcgtacttaaatatggaactaaccattccaattttcgccacgaattccgactgcgagcttattgttaaggcaatgcaaggtctcctaaaagatggaaacccgattccctcagcaatcgcagcaaactccggcatctacggtgccccaggctccgcaggaagcgcagcggggtccggagcttctaactttactcagttcgttctcgtcgacaatggcggaactggcgacgtgactgtcgccccaagcaacttcgctaacgggatcgctgaatggatcagctctaactcgcgttcacaggcttacaaagtaacctgtagcgttcgtcagagctctgcgcagaatcgcaaatacaccatcaaagtcgaggtgcctaaaggcgcctggcgttcgtacttaaatatggaactaaccattccaattttcgccacgaattccgactgcgagcttattgttaaggcaatgcaaggtctcctaaaagatggaaacccgattccctcagcaatcgcagcaaactccggcatctacggcgcacctggtagtgctggttctgctgctggatcaggtgcttctaactttactcagttcgttctcgtcgacaatggcggaactggcgacgtgactgtcgccccaagcaacttcgctaacgggatcgctgaatggatcagctctaactcgcgttcacaggcttacaaagtaacctgtagcgttcgtcagagctctgcgcagaatcgcaaatacaccatcaaagtcgaggtgcctaaaggcgcctggcgttcgtacttaaatatggaactaaccattccaattttcgccacgaattccgactgcgagcttattgttaaggcaatgcaaggtctcctaaaagatggaaacccgattccctcagcaatcgcagcaaactccggcatctacggtaccggcgcccccggctccgccggctccgccgccggctccggcgcgtgcccggtgccgctgcagctgccgccgctggaacgcctgaccctggatgataaaaaaccgctgaataccctgatctctgctactggtctgtggatgagtcgtaccggaaccattcataaaatcaaacaccacgaggttagccgttcgaaaatctatattgagatggcgtgtggcgatcatctggttgtgaacaatagccgctcttctcgtacagcacgtgcactgcgtcaccacaaatatcgtaaaacctgtaaacgttgccgtgtgtccgatgaggatctgaacaaattcctgacaaaagccaatgaggaccaaacaagcgtgaaagtgaaagtcgttagcgctcctacccgtactaaaaaagcaatgccgaaatccgttgctcgtgcccctaaaccactggaaaacactgaagcagcacaggcacagccgtctggaagcaaattctctccggccattcctgtttctacccaggagtccgtttctgttccagcaagtgtgagcaccagcattagcagtattagcaccggtgccaccgctagcgccctggttaaaggcaataccaatccgattacaagcatgtctgccccggttcaagcatcagctccagcactgacaaaatcccaaaccgatcgtctggaggttctgctgaatccgaaagacgaaatcagcctgaattccggcaaaccgtttcgtgaactggagagcgaactgctgtcacgtcgtaaaaaagacctgcaacaaatctatgccgaagaacgtgagaactatctggggaaactggaacgtgaaatcacccgctttttcgtggatcgtggctttctggagatcaaatccccgattctgattcctctggagtatatcgagcgtatgggcatcgacaatgataccgaactgagcaaacaaattttccgtgtggataaaaacttctgtctgcgccctatgctagcaccaaatctggctaactatctgcgcaaactggaccgtgccctgcctgatcctatcaaaatcttcgagatcggcccgtgttatcgtaaagagtccgacggtaaagaacatctggaggagtttaccatgctggcctttgcccaaatgggttcaggttgtactcgtgagaacctggaaagcatcatcaccgattttctgaaccacctgggcattgacttcaaaattgtgggcgacagctgtatggtgtttggcgacaccctggatgtcatgcacggcgacctggaactgtctagtgccgttgtgggcccaatcccgctggatcgtgagtggggtatcgacaaaccttggatcggtgcgggttttggtctggagcgtctgctgaaagtaaaacacgacttcaagaacatcaaacgtgctgcacgttccgagtcctattacaatggtatttctactaacctgtaa

SEQ ID NO: 120 - protein, 1430 aa, Artificial Sequence
  Description of Artificial Sequence: Synthetic polypeptide
  TOMM20-FUS-3xMCP-PylRS AAAF
MVGRNSAIAAGVCGALFIGYCIYFDRKRRSDPNFKNRLRERRKKQKLAKERAGLSKLPDLKDAEAVQKFFMASNDYTQQATQSYGAYPTQPGQGYSQQSSQPYGQQSYSGYSQSTDTSGYGQSSYSSYGQSQNTGYGTQSTPQGYGSTGGYGSSQSSQSSYGQQSSYPGYGQQPAPSNTSGSYGSSSQSSSYGQPQSGSYSQQPSYGGQQQSYGQQQSYNPPQGYGQQNQYNSSSGGGGGGGGGGNYGQDQSSMSSGGGSGGGYGNQDQSGGGGSGGYGQQDRGGRGRGGSGGGGGGGGGGYNRSSGGYEPRGRGGGRGGRGGMGGSDRGGFNKFGGPRDQGSRHDSEQDNSDNNTIFVQGLGENVTIESVADYFKQIGIIKTNKKTGQPMINLYTDRETGKLKGEATVSFDDPPSAKAAIDWFDGKEFSGNPIKVSFATRRADFNRGGGNGRGGRGRGGPMGRGGYGGGGSGGGGRGGFPSGGGGGGGQQRAGDWKCPNPTCENMNFSWRNECNQCKAPKPDGPGGGPGGSHMGGNYGDDRRGGRGGEQKLISEEDLGAPGSAGSAAGSGASNFTQFVLVDNGGTGDVTVAPSNFANGIAEWISSNSRSQAYKVTCSVRQSSAQNRKYTIKVEVPKGAWRSYLNMELTIPIFATNSDCELIVKAMQGLLKDGNPIPSAIAANSGIYGAPGSAGSAAGSGASNFTQFVLVDNGGTGDVTVAPSNFANGIAEWISSNSRSQAYKVTCSVRQSSAQNRKYTIKVEVPKGAWRSYLNMELTIPIFATNSDCELIVKAMQGLLKDGNPIPSAIAANSGIYGAPGSAGSAAGSGASNFTQFVLVDNGGTGDVTVAPSNFANGIAEWISSNSRSQAYKVTCSVRQSSAQNRKYTIKVEVPKGAWRSYLNMELTIPIFATNSDCELIVKAMQGLLKDGNPIPSAIAANSGIYGTGAPGSAGSAAGSGACPVPLQLPPLERLTLDDKKPLNTLISATGLWMSRTGTIHKIKHHEVSRSKIYIEMACGDHLVVNNSRSSRTARALRHHKYRKTCKRCRVSDEDLNKFLTKANEDQTSVKVKVVSAPTRTKKAMPKSVARAPKPLENTEAAQAQPSGSKFSPAIPVSTQESVSVPASVSTSISSISTGATASALVKGNTNPITSMSAPVQASAPALTKSQTDRLEVLLNPKDEISLNSGKPFRELESELLSRRKKDLQQIYAEERENYLGKLEREITRFFVDRGFLEIKSPILIPLEYIERMGIDNDTELSKQIFRVDKNFCLRPMLAPNLANYLRKLDRALPDPIKIFEIGPCYRKESDGKEHLEEFTMLAFAQMGSGCTRENLESIITDFLNHLGIDFKIVGDSCMVFGDTLDVMHGDLELSSAVVGPIPLDREWGIDKPWIGAGFGLERLLKVKHDFKNIKRAARSESYYNGISTNL

SEQ ID NO: 121 - DNA, 3594 bp, Artificial Sequence
  Description of Artificial Sequence: Synthetic polynucleotide
  TOMM20-FUS-4xLambdaN22-PylRS AF
  CDS (1)..(3594)
atggtgggtcggaacagcgccatcgccgccggtgtatgcggggcccttttcattgggtactgcatctacttcgaccgcaaaagacgaagtgaccccaacttcaagaacaggcttcgagaacgaagaaagaaacagaagcttgccaaggagagagctgggctttccaagttacctgaccttaaagatgctgaagctgttcagaaattcttcatggcctcaaacgattatacccaacaagcaacccaaagctatggggcctaccccacccagcccgggcagggctattcccagcagagcagtcagccctacggacagcagagttacagtggttatagccagtccacggacacttcaggatatggccagagcagctattcttcttatggccagagccagaacacaggctatggaactcagtcaactccccagggatatggctcgactggcggctatggcagtagccagagctcccaatcgtcttacgggcagcagtcctcctaccctggctatggccagcagccagctcccagcaacacctcgggaagttacggtagcagttctcagagcagcagctatgggcagccccagagtgggagctacagccagcagcctagctatggtggacagcagcaaagctatggacagcagcaaagctataatccccctcagggctatggacagcagaaccagtacaacagcagcagtggtggtggaggtggaggtggaggtggaggtaactatggccaagatcaatcctccatgagtagtggtggtggcagtggtggcggttatggcaatcaagaccagagtggtggaggtggcagcggtggctatggacagcaggaccgtggaggccgcggcaggggtggcagtggtggcggcggcggcggcggcggtggtggttacaaccgcagcagtggtggctatgaacccagaggtcgtggaggtggccgtggaggcagaggtggcatgggcggaagtgaccgtggtggcttcaataaatttggtggccctcgggaccaaggatcacgtcatgactccgaacaggataattcagacaacaacaccatctttgtgcaaggcctgggtgagaatgttacaattgagtctgtggctgattacttcaagcagattggtattattaagacaaacaagaaaacgggacagcccatgattaatttgtacacagacagggaaactggcaagctgaagggagaggcaacggtctcttttgatgacccaccttcagctaaagcagctattgactggtttgatggtaaagaattctccggaaatcctatcaaggtctcatttgctactcgccgggcagactttaatcggggtggtggcaatggtcgtggaggccgagggcgaggaggacccatgggccgtggaggctatggaggtggtggcagtggtggtggtggccgaggaggatttcccagtggaggtggtggcggtggaggacagcagcgagctggtgactggaagtgtcctaatcccacctgtgagaatatgaacttctcttggaggaatgaatgcaaccagtgtaaggcccctaaaccagatggcccaggagggggaccaggtggctctcacatggggggtaactacggggatgatcgtcgtggtggcagaggaggcgccaccatggacgcacaaacacgacgacgtgagcgtcgcgctgagaaacaagctcaatggaaagctgcaaacccaccgctcgacggagccggagctggcgctggagctggagccggagctggcggtctagccaccatggacgcacaaacacgacgacgtgagcgtcgcgctgagaaacaagctcaatggaaagctgcaaacccaccgctcgacggagccggagctggcgctggagctggagccggagctggcggtctagccaccatggacgcacaaacacgacgacgtgagcgtcgcgctgagaaacaagctcaatggaaagctgcaaacccaccgctcgacggagccggagctggcgctggagctggagccggagctggcggtctagccaccatggacgcacaaacacgacgacgtgagcgtcgcgctgagaaacaagctcaatggaaagctgcaaacccaccgctcgattacaaggatgacgacgataagggtaccggcgcccccggctccgccggctccgccgccggctccggcgcgtgcccggtgccgctgcagctgccgccgctggaacgcctgaccctggatgataaaaaaccgctgaataccctgatctctgctactggtctgtggatgagtcgtaccggaaccattcataaaatcaaacaccacgaggttagccgttcgaaaatctatattgagatggcgtgtggcgatcatctggttgtgaacaatagccgctcttctcgtacagcacgtgcactgcgtcaccacaaatatcgtaaaacctgtaaacgttgccgtgtgtccgatgaggatctgaacaaattcctgacaaaagccaatgaggaccaaacaagcgtgaaagtgaaagtcgttagcgctcctacccgtactaaaaaagcaatgccgaaatccgttgctcgtgcccctaaaccactggaaaacactgaagcagcacaggcacagccgtctggaagcaaattctctccggccattcctgtttctacccaggagtccgtttctgttccagcaagtgtgagcaccagcattagcagtattagcaccggtgccaccgctagcgccctggttaaaggcaataccaatccgattacaagcatgtctgccccggttcaagcatcagctccagcactgacaaaatcccaaaccgatcgtctggaggttctgctgaatccgaaagacgaaatcagcctgaattccggcaaaccgtttcgtgaactggagagcgaactgctgtcacgtcgtaaaaaagacctgcaacaaatctatgccgaagaacgtgagaactatctggggaaactggaacgtgaaatcacccgctttttcgtggatcgtggctttctggagatcaaatccccgattctgattcctctggagtatatcgagcgtatgggcatcgacaatgataccgaactgagcaaacaaattttccgtgtggataaaaacttctgtctgcgccctatgctagcaccaaatctggctaactatctgcgcaaactggaccgtgccctgcctgatcctatcaaaatcttcgagatcggcccgtgttatcgtaaagagtccgacggtaaagaacatctggaggagtttaccatgctgaacttttgccaaatgggttcaggttgtactcgtgagaacctggaaagcatcatcaccgattttctgaaccacctgggcattgacttcaaaattgtgggcgacagctgtatggtgtttggcgacaccctggatgtcatgcacggcgacctggaactgtctagtgccgttgtgggcccaatcccgctggatcgtgagtggggtatcgacaaaccttggatcggtgcgggttttggtctggagcgtctgctgaaagtaaaacacgacttcaagaacatcaaacgtgctgcacgttccgagtcctattacaatggtatttctactaacctgtaa

SEQ ID NO: 122 - protein, 1197 aa, Artificial Sequence
  Description of Artificial Sequence: Synthetic polypeptide
  TOMM20-FUS-4xLambdaN22-PylRS AF
MVGRNSAIAAGVCGALFIGYCIYFDRKRRSDPNFKNRLRERRKKQKLAKERAGLSKLPDLKDAEAVQKFFMASNDYTQQATQSYGAYPTQPGQGYSQQSSQPYGQQSYSGYSQSTDTSGYGQSSYSSYGQSQNTGYGTQSTPQGYGSTGGYGSSQSSQSSYGQQSSYPGYGQQPAPSNTSGSYGSSSQSSSYGQPQSGSYSQQPSYGGQQQSYGQQQSYNPPQGYGQQNQYNSSSGGGGGGGGGGNYGQDQSSMSSGGGSGGGYGNQDQSGGGGSGGYGQQDRGGRGRGGSGGGGGGGGGGYNRSSGGYEPRGRGGGRGGRGGMGGSDRGGFNKFGGPRDQGSRHDSEQDNSDNNTIFVQGLGENVTIESVADYFKQIGIIKTNKKTGQPMINLYTDRETGKLKGEATVSFDDPPSAKAAIDWFDGKEFSGNPIKVSFATRRADFNRGGGNGRGGRGRGGPMGRGGYGGGGSGGGGRGGFPSGGGGGGGQQRAGDWKCPNPTCENMNFSWRNECNQCKAPKPDGPGGGPGGSHMGGNYGDDRRGGRGGATMDAQTRRRERRAEKQAQWKAANPPLDGAGAGAGAGAGAGGLATMDAQTRRRERRAEKQAQWKAANPPLDGAGAGAGAGAGAGGLATMDAQTRRRERRAEKQAQWKAANPPLDGAGAGAGAGAGAGGLATMDAQTRRRERRAEKQAQWKAANPPLDYKDDDDKGTGAPGSAGSAAGSGACPVPLQLPPLERLTLDDKKPLNTLISATGLWMSRTGTIHKIKHHEVSRSKIYIEMACGDHLVVNNSRSSRTARALRHHKYRKTCKRCRVSDEDLNKFLTKANEDQTSVKVKVVSAPTRTKKAMPKSVARAPKPLENTEAAQAQPSGSKFSPAIPVSTQESVSVPASVSTSISSISTGATASALVKGNTNPITSMSAPVQASAPALTKSQTDRLEVLLNPKDEISLNSGKPFRELESELLSRRKKDLQQIYAEERENYLGKLEREITRFFVDRGFLEIKSPILIPLEYIERMGIDNDTELSKQIFRVDKNFCLRPMLAPNLANYLRKLDRALPDPIKIFEIGPCYRKESDGKEHLEEFTMLNFCQMGSGCTRENLESIITDFLNHLGIDFKIVGDSCMVFGDTLDVMHGDLELSSAVVGPIPLDREWGIDKPWIGAGFGLERLLKVKHDFKNIKRAARSESYYNGISTNL

SEQ ID NO: 123 - DNA, 3594 bp, Artificial Sequence
  Description of Artificial Sequence: Synthetic polynucleotide
  TOMM20-FUS-4xLambdaN22-PylRS AAAF
  CDS (1)..(3594)
atggtgggtcggaacagcgccatcgccgccggtgtatgcggggcccttttcattgggtactgcatctacttcgaccgcaaaagacgaagtgaccccaacttcaagaacaggcttcgagaacgaagaaagaaacagaagcttgccaaggagagagctgggctttccaagttacctgaccttaaagatgctgaagctgttcagaaattcttcatggcctcaaacgattatacccaacaagcaacccaaagctatggggcctaccccacccagcccgggcagggctattcccagcagagcagtcagccctacggacagcagagttacagtggttatagccagtccacggacacttcaggatatggccagagcagctattcttcttatggccagagccagaacacaggctatggaactcagtcaactccccagggatatggctcgactggcggctatggcagtagccagagctcccaatcgtcttacgggcagcagtcctcctaccctggctatggccagcagccagctcccagcaacacctcgggaagttacggtagcagttctcagagcagcagctatgggcagccccagagtgggagctacagccagcagcctagctatggtggacagcagcaaagctatggacagcagcaaagctataatccccctcagggctatggacagcagaaccagtacaacagcagcagtggtggtggaggtggaggtggaggtggaggtaactatggccaagatcaatcctccatgagtagtggtggtggcagtggtggcggttatggcaatcaagaccagagtggtggaggtggcagcggtggctatggacagcaggaccgtggaggccgcggcaggggtggcagtggtggcggcggcggcggcggcggtggtggttacaaccgcagcagtggtggctatgaacccagaggtcgtggaggtggccgtggaggcagaggtggcatgggcggaagtgaccgtggtggcttcaataaatttggtggccctcgggaccaaggatcacgtcatgactccgaacaggataattcagacaacaacaccatctttgtgcaaggcctgggtgagaatgttacaattgagtctgtggctgattacttcaagcagattggtattattaagacaaacaagaaaacgggacagcccatgattaatttgtacacagacagggaaactggcaagctgaagggagaggcaacggtctcttttgatgacccaccttcagctaaagcagctattgactggtttgatggtaaagaattctccggaaatcctatcaaggtctcatttgctactcgccgggcagactttaatcggggtggtggcaatggtcgtggaggccgagggcgaggaggacccatgggccgtggaggctatggaggtggtggcagtggtggtggtggccgaggaggatttcccagtggaggtggtggcggtggaggacagcagcgagctggtgactggaagtgtcctaatcccacctgtgagaatatgaacttctcttggaggaatgaatgcaaccagtgtaaggcccctaaaccagatggcccaggagggggaccaggtggctctcacatggggggtaactacggggatgatcgtcgtggtggcagaggaggcgccaccatggacgcacaaacacgacgacgtgagcgtcgcgctgagaaacaagctcaatggaaagctgcaaacccaccgctcgacggagccggagctggcgctggagctggagccggagctggcggtctagccaccatggacgcacaaacacgacgacgtgagcgtcgcgctgagaaacaagctcaatggaaagctgcaaacccaccgctcgacggagccggagctggcgctggagctggagccggagctggcggtctagccaccatggacgcacaaacacgacgacgtgagcgtcgcgctgagaaacaagctcaatggaaagctgcaaacccaccgctcgacggagccggagctggcgctggagctggagccggagctggcggtctagccaccatggacgcacaaacacgacgacgtgagcgtcgcgctgagaaacaagctcaatggaaagctgcaaacccaccgctcgattacaaggatgacgacgataagggtaccggcgcccccggctccgccggctccgccgccggctccggcgcgtgcccggtgccgctgcagctgccgccgctggaacgcctgaccctggatgataaaaaaccgctgaataccctgatctctgctactggtctgtggatgagtcgtaccggaaccattcataaaatcaaacaccacgaggttagccgttcgaaaatctatattgagatggcgtgtggcgatcatctggttgtgaacaatagccgctcttctcgtacagcacgtgcactgcgtcaccacaaatatcgtaaaacctgtaaacgttgccgtgtgtccgatgaggatctgaacaaattcctgacaaaagccaatgaggaccaaacaagcgtgaaagtgaaagtcgttagcgctcctacccgtactaaaaaagcaatgccgaaatccgttgctcgtgcccctaaaccactggaaaacactgaagcagcacaggcacagccgtctggaagcaaattctctccggccattcctgtttctacccaggagtccgtttctgttccagcaagtgtgagcaccagcattagcagtattagcaccggtgccaccgctagcgccctggttaaaggcaataccaatccgattacaagcatgtctgccccggttcaagcatcagctccagcactgacaaaatcccaaaccgatcgtctggaggttctgctgaatccgaaagacgaaatcagcctgaattccggcaaaccgtttcgtgaactggagagcgaactgctgtcacgtcgtaaaaaagacctgcaacaaatctatgccgaagaacgtgagaactatctggggaaactggaacgtgaaatcacccgctttttcgtggatcgtggctttctggagatcaaatccccgattctgattcctctggagtatatcgagcgtatgggcatcgacaatgataccgaactgagcaaacaaattttccgtgtggataaaaacttctgtctgcgccctatgctagcaccaaatctggctaactatctgcgcaaactggaccgtgccctgcctgatcctatcaaaatcttcgagatcggcccgtgttatcgtaaagagtccgacggtaaagaacatctggaggagtttaccatgctggcctttgcccaaatgggttcaggttgtactcgtgagaacctggaaagcatcatcaccgattttctgaaccacctgggcattgacttcaaaattgtgggcgacagctgtatggtgtttggcgacaccctggatgtcatgcacggcgacctggaactgtctagtgccgttgtgggcccaatcccgctggatcgtgagtggggtatcgacaaaccttggatcggtgcgggttttggtctggagcgtctgctgaaagtaaaacacgacttcaagaacatcaaacgtgctgcacgttccgagtcctattacaatggtatttctactaacctgtaa

SEQ ID NO: 124 - protein, 1197 aa, Artificial Sequence
  Description of Artificial Sequence: Synthetic polypeptide
  TOMM20-FUS-4xLambdaN22-PylRS AAAF
MVGRNSAIAAGVCGALFIGYCIYFDRKRRSDPNFKNRLRERRKKQKLAKERAGLSKLPDLKDAEAVQKFFMASNDYTQQATQSYGAYPTQPGQGYSQQSSQPYGQQSYSGYSQSTDTSGYGQSSYSSYGQSQNTGYGTQSTPQGYGSTGGYGSSQSSQSSYGQQSSYPGYGQQPAPSNTSGSYGSSSQSSSYGQPQSGSYSQQPSYGGQQQSYGQQQSYNPPQGYGQQNQYNSSSGGGGGGGGGGNYGQDQSSMSSGGGSGGGYGNQDQSGGGGSGGYGQQDRGGRGRGGSGGGGGGGGGGYNRSSGGYEPRGRGGGRGGRGGMGGSDRGGFNKFGGPRDQGSRHDSEQDNSDNNTIFVQGLGENVTIESVADYFKQIGIIKTNKKTGQPMINLYTDRETGKLKGEATVSFDDPPSAKAAIDWFDGKEFSGNPIKVSFATRRADFNRGGGNGRGGRGRGGPMGRGGYGGGGSGGGGRGGFPSGGGGGGGQQRAGDWKCPNPTCENMNFSWRNECNQCKAPKPDGPGGGPGGSHMGGNYGDDRRGGRGGATMDAQTRRRERRAEKQAQWKAANPPLDGAGAGAGAGAGAGGLATMDAQTRRRERRAEKQAQWKAANPPLDGAGAGAGAGAGAGGLATMDAQTRRRERRAEKQAQWKAANPPLDGAGAGAGAGAGAGGLATMDAQTRRRERRAEKQAQWKAANPPLDYKDDDDKGTGAPGSAGSAAGSGACPVPLQLPPLERLTLDDKKPLNTLISATGLWMSRTGTIHKIKHHEVSRSKIYIEMACGDHLVVNNSRSSRTARALRHHKYRKTCKRCRVSDEDLNKFLTKANEDQTSVKVKVVSAPTRTKKAMPKSVARAPKPLENTEAAQAQPSGSKFSPAIPVSTQESVSVPASVSTSISSISTGATASALVKGNTNPITSMSAPVQASAPALTKSQTDRLEVLLNPKDEISLNSGKPFRELESELLSRRKKDLQQIYAEERENYLGKLEREITRFFVDRGFLEIKSPILIPLEYIERMGIDNDTELSKQIFRVDKNFCLRPMLAPNLANYLRKLDRALPDPIKIFEIGPCYRKESDGKEHLEEFTMLAFAQMGSGCTRENLESIITDFLNHLGIDFKIVGDSCMVFGDTLDVMHGDLELSSAVVGPIPLDREWGIDKPWIGAGFGLERLLKVKHDFKNIKRAARSESYYNGISTNL

SEQ ID NO: 125 - DNA, 2373 bp, Artificial Sequence
  Description of Artificial Sequence: Synthetic polynucleotide
  LcK-EWSR1-MCP
  CDS (1)..(2373)
atgggctgcgtgtgcagcagcaaccccgagggtaccgagctcgcgtccacggattacagtacctatagccaagctgcagcgcagcagggctacagtgcttacaccgcccagcccactcaaggatatgcacagaccacccaggcatatgggcaacaaagctatggaacctatggacagcccactgatgtcagctatacccaggctcagaccactgcaacctatgggcagaccgcctatgcaacttcttatggacagcctcccactggttatactactccaactgccccccaggcatacagccagcctgtccaggggtatggcactggtgcttatgataccaccactgctacagtcaccaccacccaggcctcctatgcagctcagtctgcatatggcactcagcctgcttatccagcctatgggcagcagccagcagccactgcacctacaagaccgcaggatggaaacaagcccactgagactagtcaacctcaatctagcacagggggttacaaccagcccagcctaggatatggacagagtaactacagttatccccaggtacctgggagctaccccatgcagccagtcactgcacctccatcctaccctcctaccagctattcctctacacagccgactagttatgatcagagcagttactctcagcagaacacctatgggcaaccgagcagctatggacagcagagtagctatggtcaacaaagcagctatgggcagcagcctcccactagttacccaccccaaactggatcctacagccaagctccaagtcaatatagccaacagagcagcagctacgggcagcagagttcattccgacaggaccaccccagtagcatgggtgtttatgggcaggagtctggaggattttccggaccaggagagaaccggagcatgagtggccctgataaccggggcaggggaagagggggatttgatcgtggaggcatgagcagaggtgggcggggaggaggacgcggtggaatgggcagcgctggagagcgaggtggcttcaataagcctggtggacccatggatgaaggaccagatcttgatctaggcccacctgtagatccagatgaagactctgacaacagtgcaatttatgtacaaggattaaatgacagtgtgactctagatgatctggcagacttctttaagcagtgtggggttgttaagatgaacaagagaactgggcaacccatgatccacatctacctggacaaggaaacaggaaagcccaaaggcgatgccacagtgtcctatgaagacccacccactgccaaggctgccgtggaatggtttgatgggaaagattttcaagggagcaaacttaaagtctcccttgctcggaagaagcctccaatgaacagtatgcggggtggtctgccaccccgtgagggcagaggcatgccaccaccactccgtggaggtccaggaggcccaggaggtcctgggggacccatgggtcgcatgggaggccgtggaggagatagaggaggcttccctccaagaggaccccggggttcccgagggaacccctctggaggaggaaacgtccagcaccgagctggagactggcagtgtcccaatccgggttgtggaaaccagaacttcgcctggagaacagagtgcaaccagtgtaaggccccaaagcctgaaggcttcctcccgccaccctttccgcccccgggtggtgatcgtggcagaggtggccctggtggcatgcggggaggaagaggtggcctcatggatcgtggtggtcccggtggaatgttcagaggtggccgtggtggagacagaggtggcttccgtggtggccggggcatggaccgaggtggctttggtggaggaagacgaggtggccctggggggccccctggacctttgatggaacaggattacaaggatgacgacgataagggtaccgagcagaagctgatctcagaggaggacctgggcgcccccggctccgccggctccgccgccggctccggcgcttctaactttactcagttcgttctcgtcgacaatggcggaactggcgacgtgactgtcgccccaagcaacttcgctaacgggatcgctgaatggatcagctctaactcgcgttcacaggcttacaaagtaacctgtagcgttcgtcagagctctgcgcagaatcgcaaatacaccatcaaagtcgaggtgcctaaaggcgcctggcgttcgtacttaaatatggaactaaccattccaattttcgccacgaattccgactgcgagcttattgttaaggcaatgcaaggtctcctaaaagatggaaacccgattccctcagcaatcgcagcaaactccggcatctactaa

SEQ ID NO: 126 - protein, 790 aa, Artificial Sequence
  Description of Artificial Sequence: Synthetic polypeptide
  LcK-EWSR1-MCP
MGCVCSSNPEGTELASTDYSTYSQAAAQQGYSAYTAQPTQGYAQTTQAYGQQSYGTYGQPTDVSYTQAQTTATYGQTAYATSYGQPPTGYTTPTAPQAYSQPVQGYGTGAYDTTTATVTTTQASYAAQSAYGTQPAYPAYGQQPAATAPTRPQDGNKPTETSQPQSSTGGYNQPSLGYGQSNYSYPQVPGSYPMQPVTAPPSYPPTSYSSTQPTSYDQSSYSQQNTYGQPSSYGQQSSYGQQSSYGQQPPTSYPPQTGSYSQAPSQYSQQSSSYGQQSSFRQDHPSSMGVYGQESGGFSGPGENRSMSGPDNRGRGRGGFDRGGMSRGGRGGGRGGMGSAGERGGFNKPGGPMDEGPDLDLGPPVDPDEDSDNSAIYVQGLNDSVTLDDLADFFKQCGVVKMNKRTGQPMIHIYLDKETGKPKGDATVSYEDPPTAKAAVEWFDGKDFQGSKLKVSLARKKPPMNSMRGGLPPREGRGMPPPLRGGPGGPGGPGGPMGRMGGRGGDRGGFPPRGPRGSRGNPSGGGNVQHRAGDWQCPNPGCGNQNFAWRTECNQCKAPKPEGFLPPPFPPPGGDRGRGGPGGMRGGRGGLMDRGGPGGMFRGGRGGDRGGFRGGRGMDRGGFGGGRRGGPGGPPGPLMEQDYKDDDDKGTEQKLISEEDLGAPGSAGSAAGSGASNFTQFVLVDNGGTGDVTVAPSNFANGIAEWISSNSRSQAYKVTCSVRQSSAQNRKYTIKVEVPKGAWRSYLNMELTIPIFATNSDCELIVKAMQGLLKDGNPIPSAIAANSGIY

SEQ ID NO: 127 - DNA, 2550 bp, Artificial Sequence
  Description of Artificial Sequence: Synthetic polynucleotide
  LcK-EWSR1-4x Lambda N22
  CDS (1)..(2550)
atgggctgcgtgtgcagcagcaaccccgagggtaccgagctcgcgtccacggattacagtacctatagccaagctgcagcgcagcagggctacagtgcttacaccgcccagcccactcaaggatatgcacagaccacccaggcatatgggcaacaaagctatggaacctatggacagcccactgatgtcagctatacccaggctcagaccactgcaacctatgggcagaccgcctatgcaacttcttatggacagcctcccactggttatactactccaactgccccccaggcatacagccagcctgtccaggggtatggcactggtgcttatgataccaccactgctacagtcaccaccacccaggcctcctatgcagctcagtctgcatatggcactcagcctgcttatccagcctatgggcagcagccagcagccactgcacctacaagaccgcaggatggaaacaagcccactgagactagtcaacctcaatctagcacagggggttacaaccagcccagcctaggatatggacagagtaactacagttatccccaggtacctgggagctaccccatgcagccagtcactgcacctccatcctaccctcctaccagctattcctctacacagccgactagttatgatcagagcagttactctcagcagaacacctatgggcaaccgagcagctatggacagcagagtagctatggtcaacaaagcagctatgggcagcagcctcccactagttacccaccccaaactggatcctacagccaagctccaagtcaatatagccaacagagcagcagctacgggcagcagagttcattccgacaggaccaccccagtagcatgggtgtttatgggcaggagtctggaggattttccggaccaggagagaaccggagcatgagtggccctgataaccggggcaggggaagagggggatttgatcgtggaggcatgagcagaggtgggcggggaggaggacgcggtggaatgggcagcgctggagagcgaggtggcttcaataagcctggtggacccatggatgaaggaccagatcttgatctaggcccacctgtagatccagatgaagactctgacaacagtgcaatttatgtacaaggattaaatgacagtgtgactctagatgatctggcagacttctttaagcagtgtggggttgttaagatgaacaagagaactgggcaacccatgatccacatctacctggacaaggaaacaggaaagcccaaaggcgatgccacagtgtcctatgaagacccacctactgccaaggctgccgtggaatggtttgatgggaaagattttcaagggagcaaacttaaagtctcccttgctcggaagaagcctccaatgaacagtatgcggggtggtctgccaccccgtgagggcagaggcatgccaccaccactccgtggaggtccaggaggcccaggaggtcctgggggacccatgggtcgcatgggaggccgtggaggagatagaggaggcttccctccaagaggaccccggggttcccgagggaacccctctggaggaggaaacgtccagcaccgagctggagactggcagtgtcccaatccgggttgtggaaaccagaacttcgcctggagaacagagtgcaaccagtgtaaggccccaaagcctgaaggcttcctcccgccaccctttccgcccccgggtggtgatcgtggcagaggtggccctggtggcatgcggggaggaagaggtggcctcatggatcgtggtggtcccggtggaatgttcagaggtggccgtggtggagacagaggtggcttccgtggtggccggggcatggaccgaggtggctttggtggaggaagacgaggtggccctggggggccccctggacctttgatggaacaggattacaaggatgacgacgataagggtaccgagcagaagctgatctcagaggaggacctgctagccaccatggacgcacaaacacgacgacgtgagcgtcgcgctgagaaacaagctcaatggaaagctgcaaacccaccgctcgacggagccggagctggcgctggagctggagccggagctggcggtctagccaccatggacgcacaaacacgacgacgtgagcgtcgcgctgagaaacaagctcaatggaaagctgcaaacccaccgctcgacggagccggagctggcgctggagctggagccggagctggcggtctagccaccatggacgcacaaacacgacgacgtgagcgtcgcgctgagaaacaagctcaatggaaagctgcaaacccaccgctcgacggagccggagctggcgctggagctggagccggagctggcggtctagccaccatggacgcacaaacacgacgacgtgagcgtcgcgctgagaaacaagctcaatggaaagctgcaaacccaccgctcgagtctagagggcccgttaaacccgctgatcagcctcgactgtgccttctagttgccagccatctgttgtttgcccctcccccgtgccttccttga

SEQ ID NO: 128 - protein, 849 aa, Artificial Sequence
  Description of Artificial Sequence: Synthetic polypeptide
  LcK-EWSR1-4x Lambda N22
MGCVCSSNPEGTELASTDYSTYSQAAAQQGYSAYTAQPTQGYAQTTQAYGQQSYGTYGQPTDVSYTQAQTTATYGQTAYATSYGQPPTGYTTPTAPQAYSQPVQGYGTGAYDTTTATVTTTQASYAAQSAYGTQPAYPAYGQQPAATAPTRPQDGNKPTETSQPQSSTGGYNQPSLGYGQSNYSYPQVPGSYPMQPVTAPPSYPPTSYSSTQPTSYDQSSYSQQNTYGQPSSYGQQSSYGQQSSYGQQPPTSYPPQTGSYSQAPSQYSQQSSSYGQQSSFRQDHPSSMGVYGQESGGFSGPGENRSMSGPDNRGRGRGGFDRGGMSRGGRGGGRGGMGSAGERGGFNKPGGPMDEGPDLDLGPPVDPDEDSDNSAIYVQGLNDSVTLDDLADFFKQCGVVKMNKRTGQPMIHIYLDKETGKPKGDATVSYEDPPTAKAAVEWFDGKDFQGSKLKVSLARKKPPMNSMRGGLPPREGRGMPPPLRGGPGGPGGPGGPMGRMGGRGGDRGGFPPRGPRGSRGNPSGGGNVQHRAGDWQCPNPGCGNQNFAWRTECNQCKAPKPEGFLPPPFPPPGGDRGRGGPGGMRGGRGGLMDRGGPGGMFRGGRGGDRGGFRGGRGMDRGGFGGGRRGGPGGPPGPLMEQDYKDDDDKGTEQKLISEEDLLATMDAQTRRRERRAEKQAQWKAANPPLDGAGAGAGAGAGAGGLATMDAQTRRRERRAEKQAQWKAANPPLDGAGAGAGAGAGAGGLATMDAQTRRRERRAEKQAQWKAANPPLDGAGAGAGAGAGAGGLATMDAQTRRRERRAEKQAQWKAANPPLESRGPVKPADQPRLCLLVASHLLFAPPPCLP

SEQ ID NO: 129 - DNA, 2955 bp, Artificial Sequence
  Description of Artificial Sequence: Synthetic polynucleotide
  LcK-FUS-PylRS AF
  CDS (1)..(2955)
atgggctgcgtgtgcagcagcaaccccgagggtaccgagctcgcctcaaacgattatacccaacaagcaacccaaagctatggggcctaccccacccagcccgggcagggctattcccagcagagcagtcagccctacggacagcagagttacagtggttatagccagtccacggacacttcaggatatggccagagcagctattcttcttatggccagagccagaacacaggctatggaactcagtcaactccccagggatatggctcgactggcggctatggcagtagccagagctcccaatcgtcttacgggcagcagtcctcctaccctggctatggccagcagccagctcccagcaacacctcgggaagttacggtagcagttctcagagcagcagctatgggcagccccagagtgggagctacagccagcagcctagctatggtggacagcagcaaagctatggacagcagcaaagctataatccccctcagggctatggacagcagaaccagtacaacagcagcagtggtggtggaggtggaggtggaggtggaggtaactatggccaagatcaatcctccatgagtagtggtggtggcagtggtggcggttatggcaatcaagaccagagtggtggaggtggcagcggtggctatggacagcaggaccgtggaggccgcggcaggggtggcagtggtggcggcggcggcggcggcggtggtggttacaaccgcagcagtggtggctatgaacccagaggtcgtggaggtggccgtggaggcagaggtggcatgggcggaagtgaccgtggtggcttcaataaatttggtggccctcgggaccaaggatcacgtcatgactccgaacaggataattcagacaacaacaccatctttgtgcaaggcctgggtgagaatgttacaattgagtctgtggctgattacttcaagcagattggtattattaagacaaacaagaaaacgggacagcccatgattaatttgtacacagacagggaaactggcaagctgaagggagaggcaacggtctcttttgatgacccaccttcagctaaagcagctattgactggtttgatggtaaagaattctccggaaatcctatcaaggtctcatttgctactcgccgggcagactttaatcggggtggtggcaatggtcgtggaggccgagggcgaggaggacccatgggccgtggaggctatggaggtggtggcagtggtggtggtggccgaggaggatttcccagtggaggtggtggcggtggaggacagcagcgagctggtgactggaagtgtcctaatcccacctgtgagaatatgaacttctcttggaggaatgaatgcaaccagtgtaaggcccctaaaccagatggcccaggagggggaccaggtggctctcacatggggggtaactacggggatgatcgtcgtggtggcagaggaggcgattacaaggatgacgacgataagggtaccggcgcccccggctccgccggctccgccgccggctccggcgcgtgcccggtgccgctgcagctgccgccgctggaacgcctgaccctggatgataaaaaaccgctgaataccctgatctctgctactggtctgtggatgagtcgtaccggaaccattcataaaatcaaacaccacgaggttagccgttcgaaaatctatattgagatggcgtgtggcgatcatctggttgtgaacaatagccgctcttctcgtacagcacgtgcactgcgtcaccacaaatatcgtaaaacctgtaaacgttgccgtgtgtccgatgaggatctgaacaaattcctgacaaaagccaatgaggaccaaacaagcgtgaaagtgaaagtcgttagcgctcctacccgtactaaaaaagcaatgccgaaatccgttgctcgtgcccctaaaccactggaaaacactgaagcagcacaggcacagccgtctggaagcaaattctctccggccattcctgtttctacccaggagtccgtttctgttccagcaagtgtgagcaccagcattagcagtattagcaccggtgccaccgctagcgccctggttaaaggcaataccaatccgattacaagcatgtctgccccggttcaagcatcagctccagcactgacaaaatcccaaaccgatcgtctggaggttctgctgaatccgaaagacgaaatcagcctgaattccggcaaaccgtttcgtgaactggagagcgaactgctgtcacgtcgtaaaaaagacctgcaacaaatctatgccgaagaacgtgagaactatctggggaaactggaacgtgaaatcacccgctttttcgtggatcgtggctttctggagatcaaatccccgattctgattcctctggagtatatcgagcgtatgggcatcgacaatgataccgaactgagcaaacaaattttccgtgtggataaaaacttctgtctgcgccctatgctagcaccaaatctggctaactatctgcgcaaactggaccgtgccctgcctgatcctatcaaaatcttcgagatcggcccgtgttatcgtaaagagtccgacggtaaagaacatctggaggagtttaccatgctgaacttttgccaaatgggttcaggttgtactcgtgagaacctggaaagcatcatcaccgattttctgaaccacctgggcattgacttcaaaattgtgggcgacagctgtatggtgtttggcgacaccctggatgtcatgcacggcgacctggaactgtctagtgccgttgtgggcccaatcccgctggatcgtgagtggggtatcgacaaaccttggatcggtgcgggttttggtctggagcgtctgctgaaagtaaaacacgacttcaagaacatcaaacgtgctgcacgttccgagtcctattacaatggtatttctactaacctgtaa

SEQ ID NO: 130 - protein, 984 aa, Artificial Sequence
  Description of Artificial Sequence: Synthetic polypeptide
  LcK-FUS-PylRS AF
MGCVCSSNPEGTELASNDYTQQATQSYGAYPTQPGQGYSQQSSQPYGQQSYSGYSQSTDTSGYGQSSYSSYGQSQNTGYGTQSTPQGYGSTGGYGSSQSSQSSYGQQSSYPGYGQQPAPSNTSGSYGSSSQSSSYGQPQSGSYSQQPSYGGQQQSYGQQQSYNPPQGYGQQNQYNSSSGGGGGGGGGGNYGQDQSSMSSGGGSGGGYGNQDQSGGGGSGGYGQQDRGGRGRGGSGGGGGGGGGGYNRSSGGYEPRGRGGGRGGRGGMGGSDRGGFNKFGGPRDQGSRHDSEQDNSDNNTIFVQGLGENVTIESVADYFKQIGIIKTNKKTGQPMINLYTDRETGKLKGEATVSFDDPPSAKAAIDWFDGKEFSGNPIKVSFATRRADFNRGGGNGRGGRGRGGPMGRGGYGGGGSGGGGRGGFPSGGGGGGGQQRAGDWKCPNPTCENMNFSWRNECNQCKAPKPDGPGGGPGGSHMGGNYGDDRRGGRGGDYKDDDDKGTGAPGSAGSAAGSGACPVPLQLPPLERLTLDDKKPLNTLISATGLWMSRTGTIHKIKHHEVSRSKIYIEMACGDHLVVNNSRSSRTARALRHHKYRKTCKRCRVSDEDLNKFLTKANEDQTSVKVKVVSAPTRTKKAMPKSVARAPKPLENTEAAQAQPSGSKFSPAIPVSTQESVSVPASVSTSISSISTGATASALVKGNTNPITSMSAPVQASAPALTKSQTDRLEVLLNPKDEISLNSGKPFRELESELLSRRKKDLQQIYAEERENYLGKLEREITRFFVDRGFLEIKSPILIPLEYIERMGIDNDTELSKQIFRVDKNFCLRPMLAPNLANYLRKLDRALPDPIKIFEIGPCYRKESDGKEHLEEFTMLNFCQMGSGCTRENLESIITDFLNHLGIDFKIVGDSCMVFGDTLDVMHGDLELSSAVVGPIPLDREWGIDKPWIGAGFGLERLLKVKHDFKNIKRAARSESYYNGISTNL

SEQ ID NO: 131 - DNA, 3348 bp, Artificial Sequence
  Description of Artificial Sequence: Synthetic polynucleotide
  LcK-FUS-MCP-PylRS AF
  CDS (1)..(3348)
atgggctgcgtgtgcagcagcaaccccgagggtaccgagctcgcctcaaacgattatacccaacaagcaacccaaagctatggggcctaccccacccagcccgggcagggctattcccagcagagcagtcagccctacggacagcagagttacagtggttatagccagtccacggacacttcaggatatggccagagcagctattcttcttatggccagagccagaacacaggctatggaactcagtcaactccccagggatatggctcgactggcggctatggcagtagccagagctcccaatcgtcttacgggcagcagtcctcctaccctggctatggccagcagccagctcccagcagcacctcgggaagttacggtagcagttctcagagcagcagctatgggcagccccagagtgggagctacagccagcagcctagctatggtggacagcagcaaagctatggacagcagcaaagctataatccccctcagggctatggacagcagaaccagtacaacagcagcagtggtggtggaggtggaggtggaggtggaggtaactatggccaagatcaatcctccatgagtagtggtggtggcagtggtggcggttatggcaatcaagaccagagtggtggaggtggcagcggtggctatggacagcaggaccgtggaggccgcggcaggggtggcagtggtggcggcggcggcggcggcggtggtggttacaaccgcagcagtggtggctatgaacccagaggtcgtggaggtggccgtggaggcagaggtggcatgggcggaagtgaccgtggtggcttcaataaatttggtggccctcgggaccaaggatcacgtcatgactccgaacaggataattcagacaacaacaccatctttgtgcaaggcctgggtgagaatgttacaattgagtctgtggctgattacttcaagcagattggtattattaagacaaacaagaaaacgggacagcccatgattaatttgtacacagacagggaaactggcaagctgaagggagaggcaacggtctcttttgatgacccaccttcagctaaagcagctattgactggtttgatggtaaagaattctccggaaatcctatcaaggtctcatttgctactcgccgggcagactttaatcggggtggtggcaatggtcgtggaggccgagggcgaggaggacccatgggccgtggaggctatggaggtggtggcagtggtggtggtggccgaggaggatttcccagtggaggtggtggcggtggaggacagcagcgagctggtgactggaagtgtcctaatcccacctgtgagaatatgaacttctcttggaggaatgaatgcaaccagtgtaaggcccctaaaccagatggcccaggagggggaccaggtggctctcacatggggggtaactacggggatgatcgtcgtggtggcagaggaggcgattacaaggatgacgacgataagggtaccggcgcccccggctccgccggctccgccgccggctccggcgcttctaactttactcagttcgttctcgtcgacaatggcggaactggcgacgtgactgtcgccccaagcaacttcgctaacgggatcgctgaatggatcagctctaactcgcgttcacaggcttacaaagtaacctgtagcgttcgtcagagctctgcgcagaatcgcaaatacaccatcaaagtcgaggtgcctaaaggcgcctggcgttcgtacttaaatatggaactaaccattccaattttcgccacgaattccgactgcgagcttattgttaaggcaatgcaaggtctcctaaaagatggaaacccgattccctcagcaatcgcagcaaactccggcatctacggtaccggcgcccccggctccgccggctccgccgccggctccggcgcgtgcccggtgccgctgcagctgccgccgctggaacgcctgaccctggatgataaaaaaccgctgaataccctgatctctgctactggtctgtggatgagtcgtaccggaaccattcataaaatcaaacaccacgaggttagccgttcgaaaatctatattgagatggcgtgtggcgatcatctggttgtgaacaatagccgctcttctcgtacagcacgtgcactgcgtcaccacaaatatcgtaaaacctgtaaacgttgccgtgtgtccgatgaggatctgaacaaattcctgacaaaagccaatgaggaccaaacaagcgtgaaagtgaaagtcgttagcgctcctacccgtactaaaaaagcaatgccgaaatccgttgctcgtgcccctaaaccactggaaaacactgaagcagcacaggcacagccgtctggaagcaaattctctccggccattcctgtttctacccaggagtccgtttctgttccagcaagtgtgagcaccagcattagcagtattagcaccggtgccaccgctagcgccctggttaaaggcaataccaatccgattacaagcatgtctgccccggttcaagcatcagctccagcactgacaaaatcccaaaccgatcgtctggaggttctgctgaatccgaaagacgaaatcagcctgaattccggcaaaccgtttcgtgaactggagagcgaactgctgtcacgtcgtaaaaaagacctgcaacaaatctatgccgaagaacgtgagaactatctggggaaactggaacgtgaaatcacccgctttttcgtggatcgtggctttctggagatcaaatccccgattctgattcctctggagtatatcgagcgtatgggcatcgacaatgataccgaactgagcaaacaaattttccgtgtggataaaaacttctgtctgcgccctatgctagcaccaaatctggctaactatctgcgcaaactggaccgtgccctgcctgatcctatcaaaatcttcgagatcggcccgtgttatcgtaaagagtccgacggtaaagaacatctggaggagtttaccatgctgaacttttgccaaatgggttcaggttgtactcgtgagaacctggaaagcatcatcaccgattttctgaaccacctgggcattgacttcaaaattgtgggcgacagctgtatggtgtttggcgacaccctggatgtcatgcacggcgacctggaactgtctagtgccgttgtgggcccaatcccgctggatcgtgagtggggtatcgacaaaccttggatcggtgcgggttttggtctggagcgtctgctgaaagtaaaacacgacttcaagaacatcaaacgtgctgcacgttccgagtcctattacaatggtatttctactaacctgtaa

SEQ ID NO: 132 - protein, 1115 aa, Artificial Sequence
  Description of Artificial Sequence: Synthetic polypeptide
  LcK-FUS-MCP-PylRS AF
MGCVCSSNPEGTELASNDYTQQATQSYGAYPTQPGQGYSQQSSQPYGQQSYSGYSQSTDTSGYGQSSYSSYGQSQNTGYGTQSTPQGYGSTGGYGSSQSSQSSYGQQSSYPGYGQQPAPSSTSGSYGSSSQSSSYGQPQSGSYSQQPSYGGQQQSYGQQQSYNPPQGYGQQNQYNSSSGGGGGGGGGGNYGQDQSSMSSGGGSGGGYGNQDQSGGGGSGGYGQQDRGGRGRGGSGGGGGGGGGGYNRSSGGYEPRGRGGGRGGRGGMGGSDRGGFNKFGGPRDQGSRHDSEQDNSDNNTIFVQGLGENVTIESVADYFKQIGIIKTNKKTGQPMINLYTDRETGKLKGEATVSFDDPPSAKAAIDWFDGKEFSGNPIKVSFATRRADFNRGGGNGRGGRGRGGPMGRGGYGGGGSGGGGRGGFPSGGGGGGGQQRAGDWKCPNPTCENMNFSWRNECNQCKAPKPDGPGGGPGGSHMGGNYGDDRRGGRGGDYKDDDDKGTGAPGSAGSAAGSGASNFTQFVLVDNGGTGDVTVAPSNFANGIAEWISSNSRSQAYKVTCSVRQSSAQNRKYTIKVEVPKGAWRSYLNMELTIPIFATNSDCELIVKAMQGLLKDGNPIPSAIAANSGIYGTGAPGSAGSAAGSGACPVPLQLPPLERLTLDDKKPLNTLISATGLWMSRTGTIHKIKHHEVSRSKIYIEMACGDHLVVNNSRSSRTARALRHHKYRKTCKRCRVSDEDLNKFLTKANEDQTSVKVKVVSAPTRTKKAMPKSVARAPKPLENTEAAQAQPSGSKFSPAIPVSTQESVSVPASVSTSISSISTGATASALVKGNTNPITSMSAPVQASAPALTKSQTDRLEVLLNPKDEISLNSGKPFRELESELLSRRKKDLQQIYAEERENYLGKLEREITRFFVDRGFLEIKSPILIPLEYIERMGIDNDTELSKQIFRVDKNFCLRPMLAPNLANYLRKLDRALPDPIKIFEIGPCYRKESDGKEHLEEFTMLNFCQMGSGCTRENLESIITDFLNHLGIDFKIVGDSCMVFGDTLDVMHGDLELSSAVVGPIPLDREWGIDKPWIGAGFGLERLLKVKHDFKNIKRAARSESYYNGISTNL

SEQ ID NO: 133 - DNA, 4122 bp, Artificial Sequence
  Description of Artificial Sequence: Synthetic polynucleotide
  LCK-FUS-3xMCP-PylRS AF
  CDS (1)..(4122)
atgggctgcgtgtgcagcagcaaccccgagggtaccgagctcgcctcaaacgattatacccaacaagcaacccaaagctatggggcctaccccacccagcccgggcagggctattcccagcagagcagtcagccctacggacagcagagttacagtggttatagccagtccacggacacttcaggatatggccagagcagctattcttcttatggccagagccagaacacaggctatggaactcagtcaactccccagggatatggctcgactggcggctatggcagtagccagagctcccaatcgtcttacgggcagcagtcctcctaccctggctatggccagcagccagctcccagcaacacctcgggaagttacggtagcagttctcagagcagcagctatgggcagccccagagtgggagctacagccagcagcctagctatggtggacagcagcaaagctatggacagcagcaaagctataatccccctcagggctatggacagcagaaccagtacaacagcagcagtggtggtggaggtggaggtggaggtggaggtaactatggccaagatcaatcctccatgagtagtggtggtggcagtggtggcggttatggcaatcaagaccagagtggtggaggtggcagcggtggctatggacagcaggaccgtggaggccgcggcaggggtggcagtggtggcggcggcggcggcggcggtggtggttacaaccgcagcagtggtggctatgaacccagaggtcgtggaggtggccgtggaggcagaggtggcatgggcggaagtgaccgtggtggcttcaataaatttggtggccctcgggaccaaggatcacgtcatgactccgaacaggataattcagacaacaacaccatctttgtgcaaggcctgggtgagaatgttacaattgagtctgtggctgattacttcaagcagattggtattattaagacaaacaagaaaacgggacagcccatgattaatttgtacacagacagggaaactggcaagctgaagggagaggcaacggtctcttttgatgacccaccttcagctaaagcagctattgactggtttgatggtaaagaattctccggaaatcctatcaaggtctcatttgctactcgccgggcagactttaatcggggtggtggcaatggtcgtggaggccgagggcgaggaggacccatgggccgtggaggctatggaggtggtggcagtggtggtggtggccgaggaggatttcccagtggaggtggtggcggtggaggacagcagcgagctggtgactggaagtgtcctaatcccacctgtgagaatatgaacttctcttggaggaatgaatgcaaccagtgtaaggcccctaaaccagatggcccaggagggggaccaggtggctctcacatggggggtaactacggggatgatcgtcgtggtggcagaggaggcgagcagaagctgatctcagaggaggacctgggcgcccccggctccgccggctccgccgccggctccggcgcttctaactttactcagttcgttctcgtcgacaatggcggaactggcgacgtgactgtcgccccaagcaacttcgctaacgggatcgctgaatggatcagctctaactcgcgttcacaggcttacaaagtaacctgtagcgttcgtcagagctctgcgcagaatcgcaaatacaccatcaaagtcgaggtgcctaaaggcgcctggcgttcgtacttaaatatggaactaaccattccaattttcgccacgaattccgactgcgagcttattgttaaggcaatgcaaggtctcctaaaagatggaaacccgattccctcagcaatcgcagcaaactccggcatctacggtgccccaggctccgcaggaagcgcagcggggtccggagcttctaactttactcagttcgttctcgtcgacaatggcggaactggcgacgtgactgtcgccccaagcaacttcgctaacgggatcgctgaatggatcagctctaactcgcgttcacaggcttacaaagtaacctgtagcgttcgtcagagctctgcgcagaatcgcaaatacaccatcaaagtcgaggtgcctaaaggcgcctggcgttcgtacttaaatatggaactaaccattccaattttcgccacgaattccgactgcgagcttattgttaaggcaatgcaaggtctcctaaaagatggaaacccgattccctcagcaatcgcagcaaactccggcatctacggcgcacctggtagtgctggttctgctgctggatcaggtgcttctaactttactcagttcgttctcgtcgacaatggcggaactggcgacgtgactgtcgccccaagcaacttcgctaacgggatcgctgaatggatcagctctaactcgcgttcacaggcttacaaagtaacctgtagcgttcgtcagagctctgcgcagaatcgcaaatacaccatcaaagtcgaggtgcctaaaggcgcctggcgttcgtacttaaatatggaactaaccattccaattttcgccacgaattccgactgcgagcttattgttaaggcaatgcaaggtctcctaaaagatggaaacccgattccctcagcaatcgcagcaaactccggcatctacggtaccggcgcccccggctccgccggctccgccgccggctccggcgcgtgcccggtgccgctgcagctgccgccgctggaacgcctgaccctggatgataaaaaaccgctgaataccctgatctctgctactggtctgtggatgagtcgtaccggaaccattcataaaatcaaacaccacgaggttagccgttcgaaaatctatattgagatggcgtgtggcgatcatctggttgtgaacaatagccgctcttctcgtacagcacgtgcactgcgtcaccacaaatatcgtaaaacctgtaaacgttgccgtgtgtccgatgaggatctgaacaaattcctgacaaaagccaatgaggaccaaacaagcgtgaaagtgaaagtcgttagcgctcctacccgtactaaaaaagcaatgccgaaatccgttgctcgtgcccctaaaccactggaaaacactgaagcagcacaggcacagccgtctggaagcaaattctctccggccattcctgtttctacccaggagtccgtttctgttccagcaagtgtgagcaccagcattagcagtattagcaccggtgccaccgctagcgccctggttaaaggcaataccaatccgattacaagcatgtctgccccggttcaagcatcagctccagcactgacaaaatcccaaaccgatcgtctggaggttctgctgaatccgaaagacgaaatcagcctgaattccggcaaaccgtttcgtgaactggagagcgaactgctgtcacgtcgtaaaaaagacctgcaacaaatctatgccgaagaacgtgagaactatctggggaaactggaacgtgaaatcacccgctttttcgtggatcgtggctttctggagatcaaatccccgattctgattcctctggagtatatcgagcgtatgggcatcgacaatgataccgaactgagcaaacaaattttccgtgtggataaaaacttctgtctgcgccctatgctagcaccaaatctggctaactatctgcgcaaactggaccgtgccctgcctgatcctatcaaaatcttcgagatcggcccgtgttatcgtaaagagtccgacggtaaagaacatctggaggagtttaccatgctgaacttttgccaaatgggttcaggttgtactcgtgagaacctggaaagcatcatcaccgattttctgaaccacctgggcattgacttcaaaattgtgggcgacagctgtatggtgtttggcgacaccctggatgtcatgcacggcgacctggaactgtctagtgccgttgtgggcccaatcccgctggatcgtgagtggggtatcgacaaaccttggatcggtgcgggttttggtctggagcgtctgctgaaagtaaaacacgacttcaagaacatcaaacgtgctgcacgttccgagtcctattacaatggtatttctactaacctgtaa

SEQ ID NO: 134 - protein, 1373 aa, Artificial Sequence
  Description of Artificial Sequence: Synthetic polypeptide
  LCK-FUS-3xMCP-PylRS AF
MGCVCSSNPEGTELASNDYTQQATQSYGAYPTQPGQGYSQQSSQPYGQQSYSGYSQSTDTSGYGQSSYSSYGQSQNTGYGTQSTPQGYGSTGGYGSSQSSQSSYGQQSSYPGYGQQPAPSNTSGSYGSSSQSSSYGQPQSGSYSQQPSYGGQQQSYGQQQSYNPPQGYGQQNQYNSSSGGGGGGGGGGNYGQDQSSMSSGGGSGGGYGNQDQSGGGGSGGYGQQDRGGRGRGGSGGGGGGGGGGYNRSSGGYEPRGRGGGRGGRGGMGGSDRGGFNKFGGPRDQGSRHDSEQDNSDNNTIFVQGLGENVTIESVADYFKQIGIIKTNKKTGQPMINLYTDRETGKLKGEATVSFDDPPSAKAAIDWFDGKEFSGNPIKVSFATRRADFNRGGGNGRGGRGRGGPMGRGGYGGGGSGGGGRGGFPSGGGGGGGQQRAGDWKCPNPTCENMNFSWRNECNQCKAPKPDGPGGGPGGSHMGGNYGDDRRGGRGGEQKLISEEDLGAPGSAGSAAGSGASNFTQFVLVDNGGTGDVTVAPSNFANGIAEWISSNSRSQAYKVTCSVRQSSAQNRKYTIKVEVPKGAWRSYLNMELTIPIFATNSDCELIVKAMQGLLKDGNPIPSAIAANSGIYGAPGSAGSAAGSGASNFTQFVLVDNGGTGDVTVAPSNFANGIAEWISSNSRSQAYKVTCSVRQSSAQNRKYTIKVEVPKGAWRSYLNMELTIPIFATNSDCELIVKAMQGLLKDGNPIPSAIAANSGIYGAPGSAGSAAGSGASNFTQFVLVDNGGTGDVTVAPSNFANGIAEWISSNSRSQAYKVTCSVRQSSAQNRKYTIKVEVPKGAWRSYLNMELTIPIFATNSDCELIVKAMQGLLKDGNPIPSAIAANSGIYGTGAPGSAGSAAGSGACPVPLQLPPLERLTLDDKKPLNTLISATGLWMSRTGTIHKIKHHEVSRSKIYIEMACGDHLVVNNSRSSRTARALRHHKYRKTCKRCRVSDEDLNKFLTKANEDQTSVKVKVVSAPTRTKKAMPKSVARAPKPLENTEAAQAQPSGSKFSPAIPVSTQESVSVPASVSTSISSISTGATASALVKGNTNPITSMSAPVQASAPALTKSQTDRLEVLLNPKDEISLNSGKPFRELESELLSRRKKDLQQIYAEERENYLGKLEREITRFFVDRGFLEIKSPILIPLEYIERMGIDNDTELSKQIFRVDKNFCLRPMLAPNLANYLRKLDRALPDPIKIFEIGPCYRKESDGKEHLEEFTMLNFCQMGSGCTRENLESIITDFLNHLGIDFKIVGDSCMVFGDTLDVMHGDLELSSAVVGPIPLDREWGIDKPWIGAGFGLERLLKVKHDFKNIKRAARSESYYNGISTNL

SEQ ID NO: 135 - DNA, 2955 bp, Artificial Sequence
  Description of Artificial Sequence: Synthetic polynucleotide
  LcK-FUS-PylRS AAAF
  CDS (1)..(2955)
atgggctgcgtgtgcagcagcaaccccgagggtaccgagctcgcctcaaacgattatacccaacaagcaacccaaagctatggggcctaccccacccagcccgggcagggctattcccagcagagcagtcagccctacggacagcagagttacagtggttatagccagtccacggacacttcaggatatggccagagcagctattcttcttatggccagagccagaacacaggctatggaactcagtcaactccccagggatatggctcgactggcggctatggcagtagccagagctcccaatcgtcttacgggcagcagtcctcctaccctggctatggccagcagccagctcccagcaacacctcgggaagttacggtagcagttctcagagcagcagctatgggcagccccagagtgggagctacagccagcagcctagctatggtggacagcagcaaagctatggacagcagcaaagctataatccccctcagggctatggacagcagaaccagtacaacagcagcagtggtggtggaggtggaggtggaggtggaggtaactatggccaagatcaatcctccatgagtagtggtggtggcagtggtggcggttatggcaatcaagaccagagtggtggaggtggcagcggtggctatggacagcaggaccgtggaggccgcggcaggggtggcagtggtggcggcggcggcggcggcggtggtggttacaaccgcagcagtggtggctatgaacccagaggtcgtggaggtggccgtggaggcagaggtggcatgggcggaagtgaccgtggtggcttcaataaatttggtggccctcgggaccaaggatcacgtcatgactccgaacaggataattcagacaacaacaccatctttgtgcaaggcctgggtgagaatgttacaattgagtctgtggctgattacttcaagcagattggtattattaagacaaacaagaaaacgggacagcccatgattaatttgtacacagacagggaaactggcaagctgaagggagaggcaacggtctcttttgatgacccaccttcagctaaagcagctattgactggtttgatggtaaagaattctccggaaatcctatcaaggtctcatttgctactcgccgggcagactttaatcggggtggtggcaatggtcgtggaggccgagggcgaggaggacccatgggccgtggaggctatggaggtggtggcagtggtggtggtggccgaggaggatttcccagtggaggtggtggcggtggaggacagcagcgagctggtgactggaagtgtcctaatcccacctgtgagaatatgaacttctcttggaggaatgaatgcaaccagtgtaaggcccctaaaccagatggcccaggagggggaccaggtggctctcacatggggggtaactacggggatgatcgtcgtggtggcagaggaggcgattacaaggatgacgacgataagggtaccggcgcccccggctccgccggctccgccgccggctccggcgcgtgcccggtgccgctgcagctgccgccgctggaacgcctgaccctggatgataaaaaaccgctgaataccctgatctctgctactggtctgtggatgagtcgtaccggaaccattcataaaatcaaacaccacgaggttagccgttcgaaaatctatattgagatggcgtgtggcgatcatctggttgtgaacaatagccgctcttctcgtacagcacgtgcactgcgtcaccacaaatatcgtaaaacctgtaaacgttgccgtgtgtccgatgaggatctgaacaaattcctgacaaaagccaatgaggaccaaacaagcgtgaaagtgaaagtcgttagcgctcctacccgtactaaaaaagcaatgccgaaatccgttgctcgtgcccctaaaccactggaaaacactgaagcagcacaggcacagccgtctggaagcaaattctctccggccattcctgtttctacccaggagtccgtttctgttccagcaagtgtgagcaccagcattagcagtattagcaccggtgccaccgctagcgccctggttaaaggcaataccaatccgattacaagcatgtctgccccggttcaagcatcagctccagcactgacaaaatcccaaaccgatcgtctggaggttctgctgaatccgaaagacgaaatcagcctgaattccggcaaaccgtttcgtgaactggagagcgaactgctgtcacgtcgtaaaaaagacctgcaacaaatctatgccgaagaacgtgagaactatctggggaaactggaacgtgaaatcacccgctttttcgtggatcgtggctttctggagatcaaatccccgattctgattcctctggagtatatcgagcgtatgggcatcgacaatgataccgaactgagcaaacaaattttccgtgtggataaaaacttctgtctgcgccctatgctagcaccaaatctggctaactatctgcgcaaactggaccgtgccctgcctgatcctatcaaaatcttcgagatcggcccgtgttatcgtaaagagtccgacggtaaagaacatctggaggagtttaccatgctggcctttgcccaaatgggttcaggttgtactcgtgagaacctggaaagcatcatcaccgattttctgaaccacctgggcattgacttcaaaattgtgggcgacagctgtatggtgtttggcgacaccctggatgtcatgcacggcgacctggaactgtctagtgccgttgtgggcccaatcccgctggatcgtgagtggggtatcgacaaaccttggatcggtgcgggttttggtctggagcgtctgctgaaagtaaaacacgacttcaagaacatcaaacgtgctgcacgttccgagtcctattacaatggtatttctactaacctgtaa

SEQ ID NO: 136 - protein, 984 aa, Artificial Sequence
  Description of Artificial Sequence: Synthetic polypeptide
  LcK-FUS-PylRS AAAF
MGCVCSSNPEGTELASNDYTQQATQSYGAYPTQPGQGYSQQSSQPYGQQSYSGYSQSTDTSGYGQSSYSSYGQSQNTGYGTQSTPQGYGSTGGYGSSQSSQSSYGQQSSYPGYGQQPAPSNTSGSYGSSSQSSSYGQPQSGSYSQQPSYGGQQQSYGQQQSYNPPQGYGQQNQYNSSSGGGGGGGGGGNYGQDQSSMSSGGGSGGGYGNQDQSGGGGSGGYGQQDRGGRGRGGSGGGGGGGGGGYNRSSGGYEPRGRGGGRGGRGGMGGSDRGGFNKFGGPRDQGSRHDSEQDNSDNNTIFVQGLGENVTIESVADYFKQIGIIKTNKKTGQPMINLYTDRETGKLKGEATVSFDDPPSAKAAIDWFDGKEFSGNPIKVSFATRRADFNRGGGNGRGGRGRGGPMGRGGYGGGGSGGGGRGGFPSGGGGGGGQQRAGDWKCPNPTCENMNFSWRNECNQCKAPKPDGPGGGPGGSHMGGNYGDDRRGGRGGDYKDDDDKGTGAPGSAGSAAGSGACPVPLQLPPLERLTLDDKKPLNTLISATGLWMSRTGTIHKIKHHEVSRSKIYIEMACGDHLVVNNSRSSRTARALRHHKYRKTCKRCRVSDEDLNKFLTKANEDQTSVKVKVVSAPTRTKKAMPKSVARAPKPLENTEAAQAQPSGSKFSPAIPVSTQESVSVPASVSTSISSISTGATASALVKGNTNPITSMSAPVQASAPALTKSQTDRLEVLLNPKDEISLNSGKPFRELESELLSRRKKDLQQIYAEERENYLGKLEREITRFFVDRGFLEIKSPILIPLEYIERMGIDNDTELSKQIFRVDKNFCLRPMLAPNLANYLRKLDRALPDPIKIFEIGPCYRKESDGKEHLEEFTMLAFAQMGSGCTRENLESIITDFLNHLGIDFKIVGDSCMVFGDTLDVMHGDLELSSAVVGPIPLDREWGIDKPWIGAGFGLERLLKVKHDFKNIKRAARSESYYNGISTNL

SEQ ID NO: 137 - DNA, 1455 bp, Artificial Sequence
  Description of Artificial Sequence: Synthetic polynucleotide
  LcK-PylRS AF
  CDS (1)..(1455)
atgggctgcgtgtgcagcagcaaccccgagggtaccgagctcgcgtgcccggtgccgctgcagctgccgccgctggaacgcctgaccctggatgataaaaaaccgctgaataccctgatctctgctactggtctgtggatgagtcgtaccggaaccattcataaaatcaaacaccacgaggttagccgttcgaaaatctatattgagatggcgtgtggcgatcatctggttgtgaacaatagccgctcttctcgtacagcacgtgcactgcgtcaccacaaatatcgtaaaacctgtaaacgttgccgtgtgtccgatgaggatctgaacaaattcctgacaaaagccaatgaggaccaaacaagcgtgaaagtgaaagtcgttagcgctcctacccgtactaaaaaagcaatgccgaaatccgttgctcgtgcccctaaaccactggaaaacactgaagcagcacaggcacagccgtctggaagcaaattctctccggccattcctgtttctacccaggagtccgtttctgttccagcaagtgtgagcaccagcattagcagtattagcaccggtgccaccgctagcgccctggttaaaggcaataccaatccgattacaagcatgtctgccccggttcaagcatcagctccagcactgacaaaatcccaaaccgatcgtctggaggttctgctgaatccgaaagacgaaatcagcctgaattccggcaaaccgtttcgtgaactggagagcgaactgctgtcacgtcgtaaaaaagacctgcaacaaatctatgccgaagaacgtgagaactatctggggaaactggaacgtgaaatcacccgctttttcgtggatcgtggctttctggagatcaaatccccgattctgattcctctggagtatatcgagcgtatgggcatcgacaatgataccgaactgagcaaacaaattttccgtgtggataaaaacttctgtctgcgccctatgctagcaccaaatctggctaactatctgcgcaaactggaccgtgccctgcctgatcctatcaaaatcttcgagatcggcccgtgttatcgtaaagagtccgacggtaaagaacatctggaggagtttaccatgctgaacttttgccaaatgggttcaggttgtactcgtgagaacctggaaagcatcatcaccgattttctgaaccacctgggcattgacttcaaaattgtgggcgacagctgtatggtgtttggcgacaccctggatgtcatgcacggcgacctggaactgtctagtgccgttgtgggcccaatcccgctggatcgtgagtggggtatcgacaaaccttggatcggtgcgggttttggtctggagcgtctgctgaaagtaaaacacgacttcaagaacatcaaacgtgctgcacgttccgagtcctattacaatggtatttctactaacctgtaa

SEQ ID NO: 138 - protein, 484 aa, Artificial Sequence
  Description of Artificial Sequence: Synthetic polypeptide
  LcK-PylRS AF
MGCVCSSNPEGTELACPVPLQLPPLERLTLDDKKPLNTLISATGLWMSRTGTIHKIKHHEVSRSKIYIEMACGDHLVVNNSRSSRTARALRHHKYRKTCKRCRVSDEDLNKFLTKANEDQTSVKVKVVSAPTRTKKAMPKSVARAPKPLENTEAAQAQPSGSKFSPAIPVSTQESVSVPASVSTSISSISTGATASALVKGNTNPITSMSAPVQASAPALTKSQTDRLEVLLNPKDEISLNSGKPFRELESELLSRRKKDLQQIYAEERENYLGKLEREITRFFVDRGFLEIKSPILIPLEYIERMGIDNDTELSKQIFRVDKNFCLRPMLAPNLANYLRKLDRALPDPIKIFEIGPCYRKESDGKEHLEEFTMLNFCQMGSGCTRENLESIITDFLNHLGIDFKIVGDSCMVFGDTLDVMHGDLELSSAVVGPIPLDREWGIDKPWIGAGFGLERLLKVKHDFKNIKRAARSESYYNGISTNL

SEQ ID NO: 139 - DNA, 1455 bp, Artificial Sequence
  Description of Artificial Sequence: Synthetic polynucleotide
  LcK-PylRS AAAF
  CDS (1)..(1455)
atgggctgcgtgtgcagcagcaaccccgagggtaccgagctcgcgtgcccggtgccgctgcagctgccgccgctggaacgcctgaccctggatgataaaaaaccgctgaataccctgatctctgctactggtctgtggatgagtcgtaccggaaccattcataaaatcaaacaccacgaggttagccgttcgaaaatctatattgagatggcgtgtggcgatcatctggttgtgaacaatagccgctcttctcgtacagcacgtgcactgcgtcaccacaaatatcgtaaaacctgtaaacgttgccgtgtgtccgatgaggatctgaacaaattcctgacaaaagccaatgaggaccaaacaagcgtgaaagtgaaagtcgttagcgctcctacccgtactaaaaaagcaatgccgaaatccgttgctcgtgcccctaaaccactggaaaacactgaagcagcacaggcacagccgtctggaagcaaattctctccggccattcctgtttctacccaggagtccgtttctgttccagcaagtgtgagcaccagcattagcagtattagcaccggtgccaccgctagcgccctggttaaaggcaataccaatccgattacaagcatgtctgccccggttcaagcatcagctccagcactgacaaaatcccaaaccgatcgtctggaggttctgctgaatccgaaagacgaaatcagcctgaattccggcaaaccgtttcgtgaactggagagcgaactgctgtcacgtcgtaaaaaagacctgcaacaaatctatgccgaagaacgtgagaactatctggggaaactggaacgtgaaatcacccgctttttcgtggatcgtggctttctggagatcaaatccccgattctgattcctctggagtatatcgagcgtatgggcatcgacaatgataccgaactgagcaaacaaattttccgtgtggataaaaacttctgtctgcgccctatgctagcaccaaatctggctaactatctgcgcaaactggaccgtgccctgcctgatcctatcaaaatcttcgagatcggcccgtgttatcgtaaagagtccgacggtaaagaacatctggaggagtttaccatgctggcctttgcccaaatgggttcaggttgtactcgtgagaacctggaaagcatcatcaccgattttctgaaccacctgggcattgacttcaaaattgtgggcgacagctgtatggtgtttggcgacaccctggatgtcatgcacggcgacctggaactgtctagtgccgttgtgggcccaatcccgctggatcgtgagtggggtatcgacaaaccttggatcggtgcgggttttggtctggagcgtctgctgaaagtaaaacacgacttcaagaacatcaaacgtgctgcacgttccgagtcctattacaatggtatttctactaacctgtaa

SEQ ID NO: 140 - protein, 484 aa, Artificial Sequence
  Description of Artificial Sequence: Synthetic polypeptide
  LcK-PylRS AAAF
MGCVCSSNPEGTELACPVPLQLPPLERLTLDDKKPLNTLISATGLWMSRTGTIHKIKHHEVSRSKIYIEMACGDHLVVNNSRSSRTARALRHHKYRKTCKRCRVSDEDLNKFLTKANEDQTSVKVKVVSAPTRTKKAMPKSVARAPKPLENTEAAQAQPSGSKFSPAIPVSTQESVSVPASVSTSISSISTGATASALVKGNTNPITSMSAPVQASAPALTKSQTDRLEVLLNPKDEISLNSGKPFRELESELLSRRKKDLQQIYAEERENYLGKLEREITRFFVDRGFLEIKSPILIPLEYIERMGIDNDTELSKQIFRVDKNFCLRPMLAPNLANYLRKLDRALPDPIKIFEIGPCYRKESDGKEHLEEFTMLAFAQMGSGCTRENLESIITDFLNHLGIDFKIVGDSCMVFGDTLDVMHGDLELSSAVVGPIPLDREWGIDKPWIGAGFGLERLLKVKHDFKNIKRAARSESYYNGISTNL

SEQ ID NO: 141 - DNA, 462 bp, Artificial Sequence
  Description of Artificial Sequence: Synthetic polynucleotide
  LcK-MCP
  CDS (1)..(462)
atgggctgcgtgtgcagcagcaaccccgagggtaccgagctcgagcagaagctgatctcagaggaggacctgggcgcccccggctccgccggctccgccgccggctccggcgcttctaactttactcagttcgttctcgtcgacaatggcggaactggcgacgtgactgtcgccccaagcaacttcgctaacgggatcgctgaatggatcagctctaactcgcgttcacaggcttacaaagtaacctgtagcgttcgtcagagctctgcgcagaatcgcaaatacaccatcaaagtcgaggtgcctaaaggcgcctggcgttcgtacttaaatatggaactaaccattccaattttcgccacgaattccgactgcgagcttattgttaaggcaatgcaaggtctcctaaaagatggaaacccgattccctcagcaatcgcagcaaactccggcatctactaa

SEQ ID NO: 142 - protein, 153 aa, Artificial Sequence
  Description of Artificial Sequence: Synthetic polypeptide
  LcK-MCP
MGCVCSSNPEGTELEQKLISEEDLGAPGSAGSAAGSGASNFTQFVLVDNGGTGDVTVAPSNFANGIAEWISSNSRSQAYKVTCSVRQSSAQNRKYTIKVEVPKGAWRSYLNMELTIPIFATNSDCELIVKAMQGLLKDGNPIPSAIAANSGIY

SEQ ID NO: 143 - DNA, 3348 bp, Artificial Sequence
  Description of Artificial Sequence: Synthetic polynucleotide
  FRB-CD28-FUS-PylRS AF
  CDS (1)..(3348)
atgtgccgagccatctctcttaggcgcttgctgctgctgctgctgcagctgtcacaactcctagctgtcactcaagggatgctcgagatgtggcatgaaggcctggaagaggcatctcgtttgtactttggggaaaggaacgtgaaaggcatgtttgaggtgctggagcccttgcatgctatgatggaacggggcccccagactctgaaggaaacatcctttaatcaggcctatggtcgagatttaatggaggcccaagagtggtgcaggaagtacatgaaatcagggaatgtcaaggacctcctccaagcctgggacctctattatcatgtgttccgacgaatctcaaagactagaaccggtaagcttttttgggcactggtcgtggttgctggagtcctgttttgttatggcttgctagtgacagtggctctttgtgttatctgggtaagatctggtatggcctcaaacgattatacccaacaagcaacccaaagctatggggcctaccccacccagcccgggcagggctattcccagcagagcagtcagccctacggacagcagagttacagtggttatagccagtccacggacacttcaggatatggccagagcagctattcttcttatggccagagccagaacacaggctatggaactcagtcaactccccagggatatggctcgactggcggctatggcagtagccagagctcccaatcgtcttacgggcagcagtcctcctaccctggctatggccagcagccagctcccagcagcacctcgggaagttacggtagcagttctcagagcagcagctatgggcagccccagagtgggagctacagccagcagcctagctatggtggacagcagcaaagctatggacagcagcaaagctataatccccctcagggctatggacagcagaaccagtacaacagcagcagtggtggtggaggtggaggtggaggtggaggtaactatggccaagatcaatcctccatgagtagtggtggtggcagtggtggcggttatggcaatcaagaccagagtggtggaggtggcagcggtggctatggacagcaggaccgtggaggccgcggcaggggtggcagtggtggcggcggcggcggcggcggtggtggttacaaccgcagcagtggtggctatgaacccagaggtcgtggaggtggccgtggaggcagaggtggcatgggcggaagtgaccgtggtggcttcaataaatttggtggccctcgggaccaaggatcacgtcatgactccgaacaggataattcagacaacaacaccatctttgtgcaaggcctgggtgagaatgttacaattgagtctgtggctgattacttcaagcagattggtattattaagacaaacaagaaaacgggacagcccatgattaatttgtacacagacagggaaactggcaagctgaagggagaggcaacggtctcttttgatgacccaccttcagctaaagcagctattgactggtttgatggtaaagaattctccggaaatcctatcaaggtctcatttgctactcgccgggcagactttaatcggggtggtggcaatggtcgtggaggccgagggcgaggaggacccatgggccgtggaggctatggaggtggtggcagtggtggtggtggccgaggaggatttcccagtggaggtggtggcggtggaggacagcagcgagctggtgactggaagtgtcctaatcccacctgtgagaatatgaacttctcttggaggaatgaatgcaaccagtgtaaggcccctaaaccagatggcccaggagggggaccaggtggctctcacatggggggtaactacggggatgatcgtcgtggtggcagaggaggcggcgcccccggctccgccggctccgccgccggctccggcatggcgtgcccggtgccgctgcagctgccgccgctggaacgcctgaccctggatgataaaaaaccgctgaataccctgatctctgctactggtctgtggatgagtcgtaccggaaccattcataaaatcaaacaccacgaggttagccgttcgaaaatctatattgagatggcgtgtggcgatcatctggttgtgaacaatagccgctcttctcgtacagcacgtgcactgcgtcaccacaaatatcgtaaaacctgtaaacgttgccgtgtgtccgatgaggatctgaacaaattcctgacaaaagccaatgaggaccaaacaagcgtgaaagtgaaagtcgttagcgctcctacccgtactaaaaaagcaatgccgaaatccgttgctcgtgcccctaaaccactggaaaacactgaagcagcacaggcacagccgtctggaagcaaattctctccggccattcctgtttctacccaggagtccgtttctgttccagcaagtgtgagcaccagcattagcagtattagcaccggtgccaccgctagcgccctggttaaaggcaataccaatccgattacaagcatgtctgccccggttcaagcatcagctccagcactgacaaaatcccaaaccgatcgtctggaggttctgctgaatccgaaagacgaaatcagcctgaattccggcaaaccgtttcgtgaactggagagcgaactgctgtcacgtcgtaaaaaagacctgcaacaaatctatgccgaagaacgtgagaactatctggggaaactggaacgtgaaatcacccgctttttcgtggatcgtggctttctggagatcaaatccccgattctgattcctctggagtatatcgagcgtatgggcatcgacaatgataccgaactgagcaaacaaattttccgtgtggataaaaacttctgtctgcgccctatgctagcaccaaatctggctaactatctgcgcaaactggaccgtgccctgcctgatcctatcaaaatcttcgagatcggcccgtgttatcgtaaagagtccgacggtaaagaacatctggaggagtttaccatgctgaacttttgccaaatgggttcaggttgtactcgtgagaacctggaaagcatcatcaccgattttctgaaccacctgggcattgacttcaaaattgtgggcgacagctgtatggtgtttggcgacaccctggatgtcatgcacggcgacctggaactgtctagtgccgttgtgggcccaatcccgctggatcgtgagtggggtatcgacaaaccttggatcggtgcgggttttggtctggagcgtctgctgaaagtaaaacacgacttcaagaacatcaaacgtgctgcacgttccgagtcctattacaatggtatttctactaacctgtaa

SEQ ID NO: 144 - protein, 1115 aa, Artificial Sequence
  Description of Artificial Sequence: Synthetic polypeptide
  FRB-CD28-FUS-PylRS AF
MCRAISLRRLLLLLLQLSQLLAVTQGMLEMWHEGLEEASRLYFGERNVKGMFEVLEPLHAMMERGPQTLKETSFNQAYGRDLMEAQEWCRKYMKSGNVKDLLQAWDLYYHVFRRISKTRTGKLFWALVVVAGVLFCYGLLVTVALCVIWVRSGMASNDYTQQATQSYGAYPTQPGQGYSQQSSQPYGQQSYSGYSQSTDTSGYGQSSYSSYGQSQNTGYGTQSTPQGYGSTGGYGSSQSSQSSYGQQSSYPGYGQQPAPSSTSGSYGSSSQSSSYGQPQSGSYSQQPSYGGQQQSYGQQQSYNPPQGYGQQNQYNSSSGGGGGGGGGGNYGQDQSSMSSGGGSGGGYGNQDQSGGGGSGGYGQQDRGGRGRGGSGGGGGGGGGGYNRSSGGYEPRGRGGGRGGRGGMGGSDRGGFNKFGGPRDQGSRHDSEQDNSDNNTIFVQGLGENVTIESVADYFKQIGIIKTNKKTGQPMINLYTDRETGKLKGEATVSFDDPPSAKAAIDWFDGKEFSGNPIKVSFATRRADFNRGGGNGRGGRGRGGPMGRGGYGGGGSGGGGRGGFPSGGGGGGGQQRAGDWKCPNPTCENMNFSWRNECNQCKAPKPDGPGGGPGGSHMGGNYGDDRRGGRGGGAPGSAGSAAGSGMACPVPLQLPPLERLTLDDKKPLNTLISATGLWMSRTGTIHKIKHHEVSRSKIYIEMACGDHLVVNNSRSSRTARALRHHKYRKTCKRCRVSDEDLNKFLTKANEDQTSVKVKVVSAPTRTKKAMPKSVARAPKPLENTEAAQAQPSGSKFSPAIPVSTQESVSVPASVSTSISSISTGATASALVKGNTNPITSMSAPVQASAPALTKSQTDRLEVLLNPKDEISLNSGKPFRELESELLSRRKKDLQQIYAEERENYLGKLEREITRFFVDRGFLEIKSPILIPLEYIERMGIDNDTELSKQIFRVDKNFCLRPMLAPNLANYLRKLDRALPDPIKIFEIGPCYRKESDGKEHLEEFTMLNFCQMGSGCTRENLESIITDFLNHLGIDFKIVGDSCMVFGDTLDVMHGDLELSSAVVGPIPLDREWGIDKPWIGAGFGLERLLKVKHDFKNIKRAARSESYYNGISTNL

SEQ ID NO: 145 - DNA, 3348 bp, Artificial Sequence
  Description of Artificial Sequence: Synthetic polynucleotide
  FRB-CD28-FUS-PylRS AA
  CDS (1)..(3348)
atgtgccgagccatctctcttaggcgcttgctgctgctgctgctgcagctgtcacaactcctagctgtcactcaagggatgctcgagatgtggcatgaaggcctggaagaggcatctcgtttgtactttggggaaaggaacgtgaaaggcatgtttgaggtgctggagcccttgcatgctatgatggaacggggcccccagactctgaaggaaacatcctttaatcaggcctatggtcgagatttaatggaggcccaagagtggtgcaggaagtacatgaaatcagggaatgtcaaggacctcctccaagcctgggacctctattatcatgtgttccgacgaatctcaaagactagaaccggtaagcttttttgggcactggtcgtggttgctggagtcctgttttgttatggcttgctagtgacagtggctctttgtgttatctgggtaagatctggtatggcctcaaacgattatacccaacaagcaacccaaagctatggggcctaccccacccagcccgggcagggctattcccagcagagcagtcagccctacggacagcagagttacagtggttatagccagtccacggacacttcaggatatggccagagcagctattcttcttatggccagagccagaacacaggctatggaactcagtcaactccccagggatatggctcgactggcggctatggcagtagccagagctcccaatcgtcttacgggcagcagtcctcctaccctggctatggccagcagccagctcccagcagcacctcgggaagttacggtagcagttctcagagcagcagctatgggcagccccagagtgggagctacagccagcagcctagctatggtggacagcagcaaagctatggacagcagcaaagctataatccccctcagggctatggacagcagaaccagtacaacagcagcagtggtggtggaggtggaggtggaggtggaggtaactatggccaagatcaatcctccatgagtagtggtggtggcagtggtggcggttatggcaatcaagaccagagtggtggaggtggcagcggtggctatggacagcaggaccgtggaggccgcggcaggggtggcagtggtggcggcggcggcggcggcggtggtggttacaaccgcagcagtggtggctatgaacccagaggtcgtggaggtggccgtggaggcagaggtggcatgggcggaagtgaccgtggtggcttcaataaatttggtggccctcgggaccaaggatcacgtcatgactccgaacaggataattcagacaacaacaccatctttgtgcaaggcctgggtgagaatgttacaattgagtctgtggctgattacttcaagcagattggtattattaagacaaacaagaaaacgggacagcccatgattaatttgtacacagacagggaaactggcaagctgaagggagaggcaacggtctcttttgatgacccaccttcagctaaagcagctattgactggtttgatggtaaagaattctccggaaatcctatcaaggtctcatttgctactcgccgggcagactttaatcggggtggtggcaatggtcgtggaggccgagggcgaggaggacccatgggccgtggaggctatggaggtggtggcagtggtggtggtggccgaggaggatttcccagtggaggtggtggcggtggaggacagcagcgagctggtgactggaagtgtcctaatcccacctgtgagaatatgaacttctcttggaggaatgaatgcaaccagtgtaaggcccctaaaccagatggcccaggagggggaccaggtggctctcacatggggggtaactacggggatgatcgtcgtggtggcagaggaggcggcgcccccggctccgccggctccgccgccggctccggcatggcgtgcccggtgccgctgcagctgccgccgctggaacgcctgaccctggatgacaaaaaaccgctgaataccctgatctctgctactggtctgtggatgagtcgtaccggaaccattcataaaatcaaacaccacgaggttagccgttcgaaaatctatattgagatggcgtgtggcgatcatctggttgtgaacaatagccgctcttctcgtacagcacgtgcactgcgtcaccacaaatatcgtaaaacctgtaaacgttgccgtgtgtccgatgaggatctgaacaaattcctgacaaaagccaatgaggaccaaacaagcgtgaaagtgaaagtcgttagcgctcctacccgtactaaaaaagcaatgccgaaatccgttgctcgtgcccctaaaccactggaaaacactgaagcagcacaggcacagccgtctggaagcaaattctctccggccattcctgtttctacccaggagtccgtttctgttccagcaagtgtgagcaccagcattagcagtattagcaccggtgccaccgctagcgccctggttaaaggcaataccaatccgattacaagcatgtctgccccggttcaagcatcagctccagcactgacaaaatcccaaaccgatcgtctggaggttctgctgaatccgaaagacgaaatcagcctgaattccggcaaaccgtttcgtgaactggagagcgaactgctgtcacgtcgtaaaaaagacctgcaacaaatctatgccgaagaacgtgagaactatctggggaaactggaacgtgaaatcacccgctttttcgtggatcgtggctttctggagatcaaatccccgattctgattcctctggagtatatcgagcgtatgggcatcgacaatgataccgaactgagcaaacaaattttccgtgtggataaaaacttctgtcttcgccctatgctggcaccaaatctgtataactatctgcgcaaactggaccgtgccctgcctgatcctatcaaaatcttcgagatcggcccgtgttatcgtaaagagtccgacggtaaagaacatctggaggagtttaccatgctggcctttgcccaaatgggttcaggttgtactcgtgagaacctggaaagcatcatcaccgattttctgaaccacctgggcattgacttcaaaattgtgggcgacagctgtatggtgtatggcgacaccctggatgtcatgcacggcgacctggaactgtctagtgccgttgttggaccaattccgctggaccgtgagtggggtatcgacaaaccgtggatcggagcaggattcggtctggaacgcctgctgaaagtgaaacacgacttcaaaaacatcaaacgtgccgcccgttctgaatcgtattataacgggatctctacgaacctgtaa

SEQ ID NO: 146 - protein, 1115 aa, Artificial Sequence
  Description of Artificial Sequence: Synthetic polypeptide
  FRB-CD28-FUS-PylRS AA
MCRAISLRRLLLLLLQLSQLLAVTQGMLEMWHEGLEEASRLYFGERNVKGMFEVLEPLHAMMERGPQTLKETSFNQAYGRDLMEAQEWCRKYMKSGNVKDLLQAWDLYYHVFRRISKTRTGKLFWALVVVAGVLFCYGLLVTVALCVIWVRSGMASNDYTQQATQSYGAYPTQPGQGYSQQSSQPYGQQSYSGYSQSTDTSGYGQSSYSSYGQSQNTGYGTQSTPQGYGSTGGYGSSQSSQSSYGQQSSYPGYGQQPAPSSTSGSYGSSSQSSSYGQPQSGSYSQQPSYGGQQQSYGQQQSYNPPQGYGQQNQYNSSSGGGGGGGGGGNYGQDQSSMSSGGGSGGGYGNQDQSGGGGSGGYGQQDRGGRGRGGSGGGGGGGGGGYNRSSGGYEPRGRGGGRGGRGGMGGSDRGGFNKFGGPRDQGSRHDSEQDNSDNNTIFVQGLGENVTIESVADYFKQIGIIKTNKKTGQPMINLYTDRETGKLKGEATVSFDDPPSAKAAIDWFDGKEFSGNPIKVSFATRRADFNRGGGNGRGGRGRGGPMGRGGYGGGGSGGGGRGGFPSGGGGGGGQQRAGDWKCPNPTCENMNFSWRNECNQCKAPKPDGPGGGPGGSHMGGNYGDDRRGGRGGGAPGSAGSAAGSGMACPVPLQLPPLERLTLDDKKPLNTLISATGLWMSRTGTIHKIKHHEVSRSKIYIEMACGDHLVVNNSRSSRTARALRHHKYRKTCKRCRVSDEDLNKFLTKANEDQTSVKVKVVSAPTRTKKAMPKSVARAPKPLENTEAAQAQPSGSKFSPAIPVSTQESVSVPASVSTSISSISTGATASALVKGNTNPITSMSAPVQASAPALTKSQTDRLEVLLNPKDEISLNSGKPFRELESELLSRRKKDLQQIYAEERENYLGKLEREITRFFVDRGFLEIKSPILIPLEYIERMGIDNDTELSKQIFRVDKNFCLRPMLAPNLYNYLRKLDRALPDPIKIFEIGPCYRKESDGKEHLEEFTMLAFAQMGSGCTRENLESIITDFLNHLGIDFKIVGDSCMVYGDTLDVMHGDLELSSAVVGPIPLDREWGIDKPWIGAGFGLERLLKVKHDFKNIKRAARSESYYNGISTNL

SEQ ID NO: 147 - DNA, 2790 bp, Artificial Sequence
  Description of Artificial Sequence: Synthetic polynucleotide
  FRB-CD28-EWSR1-MCP
  CDS (1)..(2790)
atgtgccgagccatctctcttaggcgcttgctgctgctgctgctgcagctgtcacaactcctagctgtcactcaagggatgctcgagatgtggcatgaaggcctggaagaggcatctcgtttgtactttggggaaaggaacgtgaaaggcatgtttgaggtgctggagcccttgcatgctatgatggaacggggcccccagactctgaaggaaacatcctttaatcaggcctatggtcgagatttaatggaggcccaagagtggtgcaggaagtacatgaaatcagggaatgtcaaggacctcctccaagcctgggacctctattatcatgtgttccgacgaatctcaaagactagaaccggtaagcttttttgggcactggtcgtggttgctggagtcctgttttgttatggcttgctagtgacagtggctctttgtgttatctgggtaagatctatggcgtccacggattacagtacctatagccaagctgcagcgcagcagggctacagtgcttacaccgcccagcccactcaaggatatgcacagaccacccaggcatatgggcaacaaagctatggaacctatggacagcccactgatgtcagctatacccaggctcagaccactgcaacctatgggcagaccgcctatgcaacttcttatggacagcctcccactggttatactactccaactgccccccaggcatacagccagcctgtccaggggtatggcactggtgcttatgataccaccactgctacagtcaccaccacccaggcctcctatgcagctcagtctgcatatggcactcagcctgcttatccagcctatgggcagcagccagcagccactgcacctacaagaccgcaggatggaaacaagcccactgagactagtcaacctcaatctagcacagggggttacaaccagcccagcctaggatatggacagagtaactacagttatccccaggtacctgggagctaccccatgcagccagtcactgcacctccatcctaccctcctaccagctattcctctacacagccgactagttatgatcagagcagttactctcagcagaacacctatgggcaaccgagcagctatggacagcagagtagctatggtcaacaaagcagctatgggcagcagcctcccactagttacccaccccaaactggatcctacagccaagctccaagtcaatatagccaacagagcagcagctacgggcagcagagttcattccgacaggaccaccccagtagcatgggtgtttatgggcaggagtctggaggattttccggaccaggagagaaccggagcatgagtggccctgataaccggggcaggggaagagggggatttgatcgtggaggcatgagcagaggtgggcggggaggaggacgcggtggaatgggcagcgctggagagcgaggtggcttcaataagcctggtggacccatggatgaaggaccagatcttgatctaggcccacctgtagatccagatgaagactctgacaacagtgcaatttatgtacaaggattaaatgacagtgtgactctagatgatctggcagacttctttaagcagtgtggggttgttaagatgaacaagagaactgggcaacccatgatccacatctacctggacaaggaaacaggaaagcccaaaggcgatgccacagtgtcctatgaagacccacctactgccaaggctgccgtggaatggtttgatgggaaagattttcaagggagcaaacttaaagtctcccttgctcggaagaagcctccaatgaacagtatgcggggtggtctgccaccccgtgagggcagaggcatgccaccaccactccgtggaggtccaggaggcccaggaggtcctgggggacccatgggtcgcatgggaggccgtggaggagatagaggaggcttccctccaagaggaccccggggttcccgagggaacccctctggaggaggaaacgtccagcaccgagctggagactggcagtgtcccaatccgggttgtggaaaccagaacttcgcctggagaacagagtgcaaccagtgtaaggccccaaagcctgaaggcttcctcccgccaccctttccgcccccgggtggtgatcgtggcagaggtggccctggtggcatgcggggaggaagaggtggcctcatggatcgtggtggtcccggtggaatgttcagaggtggccgtggtggagacagaggtggcttccgtggtggccggggcatggaccgaggtggctttggtggaggaagacgaggtggccctggggggccccctggacctttgatggaacaggattacaaggatgacgacgataagggtaccgagcagaagctgatctcagaggaggacctgggcgcccccggctccgccggctccgccgccggctccggcgcttctaactttactcagttcgttctcgtcgacaatggcggaactggcgacgtgactgtcgccccaagcaacttcgctaacgggatcgctgaatggatcagctctaactcgcgttcacaggcttacaaagtaacctgtagcgttcgtcagagctctgcgcagaatcgcaaatacaccatcaaagtcgaggtgcctaaaggcgcctggcgttcgtacttaaatatggaactaaccattccaattttcgccacgaattccgactgcgagcttattgttaaggcaatgcaaggtctcctaaaagatggaaacccgattccctcagcaatcgcagcaaactccggcatctactaa

SEQ ID NO: 148 - protein, 929 aa, Artificial Sequence
  Description of Artificial Sequence: Synthetic polypeptide
  FRB-CD28-EWSR1-MCP
MCRAISLRRLLLLLLQLSQLLAVTQGMLEMWHEGLEEASRLYFGERNVKGMFEVLEPLHAMMERGPQTLKETSFNQAYGRDLMEAQEWCRKYMKSGNVKDLLQAWDLYYHVFRRISKTRTGKLFWALVVVAGVLFCYGLLVTVALCVIWVRSMASTDYSTYSQAAAQQGYSAYTAQPTQGYAQTTQAYGQQSYGTYGQPTDVSYTQAQTTATYGQTAYATSYGQPPTGYTTPTAPQAYSQPVQGYGTGAYDTTTATVTTTQASYAAQSAYGTQPAYPAYGQQPAATAPTRPQDGNKPTETSQPQSSTGGYNQPSLGYGQSNYSYPQVPGSYPMQPVTAPPSYPPTSYSSTQPTSYDQSSYSQQNTYGQPSSYGQQSSYGQQSSYGQQPPTSYPPQTGSYSQAPSQYSQQSSSYGQQSSFRQDHPSSMGVYGQESGGFSGPGENRSMSGPDNRGRGRGGFDRGGMSRGGRGGGRGGMGSAGERGGFNKPGGPMDEGPDLDLGPPVDPDEDSDNSAIYVQGLNDSVTLDDLADFFKQCGVVKMNKRTGQPMIHIYLDKETGKPKGDATVSYEDPPTAKAAVEWFDGKDFQGSKLKVSLARKKPPMNSMRGGLPPREGRGMPPPLRGGPGGPGGPGGPMGRMGGRGGDRGGFPPRGPRGSRGNPSGGGNVQHRAGDWQCPNPGCGNQNFAWRTECNQCKAPKPEGFLPPPFPPPGGDRGRGGPGGMRGGRGGLMDRGGPGGMFRGGRGGDRGGFRGGRGMDRGGFGGGRRGGPGGPPGPLMEQDYKDDDDKGTEQKLISEEDLGAPGSAGSAAGSGASNFTQFVLVDNGGTGDVTVAPSNFANGIAEWISSNSRSQAYKVTCSVRQSSAQNRKYTIKVEVPKGAWRSYLNMELTIPIFATNSDCELIVKAMQGLLKDGNPIPSAIAANSGIY

SEQ ID NO: 149 - DNA, 2892 bp, Artificial Sequence
  Description of Artificial Sequence: Synthetic polynucleotide
  FRB-CD28-EWSR1-4x Lambda N22
  CDS (1)..(2892)
atgtgccgagccatctctcttaggcgcttgctgctgctgctgctgcagctgtcacaactcctagctgtcactcaagggatgctcgagatgtggcatgaaggcctggaagaggcatctcgtttgtactttggggaaaggaacgtgaaaggcatgtttgaggtgctggagcccttgcatgctatgatggaacggggcccccagactctgaaggaaacatcctttaatcaggcctatggtcgagatttaatggaggcccaagagtggtgcaggaagtacatgaaatcagggaatgtcaaggacctcctccaagcctgggacctctattatcatgtgttccgacgaatctcaaagactagaaccggtaagcttttttgggcactggtcgtggttgctggagtcctgttttgttatggcttgctagtgacagtggctctttgtgttatctgggtaagatctatggcgtccacggattacagtacctatagccaagctgcagcgcagcagggctacagtgcttacaccgcccagcccactcaaggatatgcacagaccacccaggcatatgggcaacaaagctatggaacctatggacagcccactgatgtcagctatacccaggctcagaccactgcaacctatgggcagaccgcctatgcaacttcttatggacagcctcccactggttatactactccaactgccccccaggcatacagccagcctgtccaggggtatggcactggtgcttatgataccaccactgctacagtcaccaccacccaggcctcctatgcagctcagtctgcatatggcactcagcctgcttatccagcctatgggcagcagccagcagccactgcacctacaagaccgcaggatggaaacaagcccactgagactagtcaacctcaatctagcacagggggttacaaccagcccagcctaggatatggacagagtaactacagttatccccaggtacctgggagctaccccatgcagccagtcactgcacctccatcctaccctcctaccagctattcctctacacagccgactagttatgatcagagcagttactctcagcagaacacctatgggcaaccgagcagctatggacagcagagtagctatggtcaacaaagcagctatgggcagcagcctcccactagttacccaccccaaactggatcctacagccaagctccaagtcaatatagccaacagagcagcagctacgggcagcagagttcattccgacaggaccaccccagtagcatgggtgtttatgggcaggagtctggaggattttccggaccaggagagaaccggagcatgagtggccctgataaccggggcaggggaagagggggatttgatcgtggaggcatgagcagaggtgggcggggaggaggacgcggtggaatgggcagcgctggagagcgaggtggcttcaataagcctggtggacccatggatgaaggaccagatcttgatctaggcccacctgtagatccagatgaagactctgacaacagtgcaatttatgtacaaggattaaatgacagtgtgactctagatgatctggcagacttctttaagcagtgtggggttgttaagatgaacaagagaactgggcaacccatgatccacatctacctggacaaggaaacaggaaagcccaaaggcgatgccacagtgtcctatgaagacccacctactgccaaggctgccgtggaatggtttgatgggaaagattttcaagggagcaaacttaaagtctcccttgctcggaagaagcctccaatgaacagtatgcggggtggtctgccaccccgtgagggcagaggcatgccaccaccactccgtggaggtccaggaggcccaggaggtcctgggggacccatgggtcgcatgggaggccgtggaggagatagaggaggcttccctccaagaggaccccggggttcccgagggaacccctctggaggaggaaacgtccagcaccgagctggagactggcagtgtcccaatccgggttgtggaaaccagaacttcgcctggagaacagagtgcaaccagtgtaaggccccaaagcctgaaggcttcctcccgccaccctttccgcccccgggtggtgatcgtggcagaggtggccctggtggcatgcggggaggaagaggtggcctcatggatcgtggtggtcccggtggaatgttcagaggtggccgtggtggagacagaggtggcttccgtggtggccggggcatggaccgaggtggctttggtggaggaagacgaggtggccctggggggccccctggacctttgatggaacaggattacaaggatgacgacgataagggtaccgagcagaagctgatctcagaggaggacctgctagccaccatggacgcacaaacacgacgacgtgagcgtcgcgctgagaaacaagctcaatggaaagctgcaaacccaccgctcgacggagccggagctggcgctggagctggagccggagctggcggtctagccaccatggacgcacaaacacgacgacgtgagcgtcgcgctgagaaacaagctcaatggaaagctgcaaacccaccgctcgacggagccggagctggcgctggagctggagccggagctggcggtctagccaccatggacgcacaaacacgacgacgtgagcgtcgcgctgagaaacaagctcaatggaaagctgcaaacccaccgctcgacggagccggagctggcgctggagctggagccggagctggcggtctagccaccatggacgcacaaacacgacgacgtgagcgtcgcgctgagaaacaagctcaatggaaagctgcaaacccaccgctcgagtctagagggcccgtttaa

SEQ ID NO: 150 - protein, 963 aa, Artificial Sequence
  Description of Artificial Sequence: Synthetic polypeptide
  FRB-CD28-EWSR1-4x Lambda N22
MCRAISLRRLLLLLLQLSQLLAVTQGMLEMWHEGLEEASRLYFGERNVKGMFEVLEPLHAMMERGPQTLKETSFNQAYGRDLMEAQEWCRKYMKSGNVKDLLQAWDLYYHVFRRISKTRTGKLFWALVVVAGVLFCYGLLVTVALCVIWVRSMASTDYSTYSQAAAQQGYSAYTAQPTQGYAQTTQAYGQQSYGTYGQPTDVSYTQAQTTATYGQTAYATSYGQPPTGYTTPTAPQAYSQPVQGYGTGAYDTTTATVTTTQASYAAQSAYGTQPAYPAYGQQPAATAPTRPQDGNKPTETSQPQSSTGGYNQPSLGYGQSNYSYPQVPGSYPMQPVTAPPSYPPTSYSSTQPTSYDQSSYSQQNTYGQPSSYGQQSSYGQQSSYGQQPPTSYPPQTGSYSQAPSQYSQQSSSYGQQSSFRQDHPSSMGVYGQESGGFSGPGENRSMSGPDNRGRGRGGFDRGGMSRGGRGGGRGGMGSAGERGGFNKPGGPMDEGPDLDLGPPVDPDEDSDNSAIYVQGLNDSVTLDDLADFFKQCGVVKMNKRTGQPMIHIYLDKETGKPKGDATVSYEDPPTAKAAVEWFDGKDFQGSKLKVSLARKKPPMNSMRGGLPPREGRGMPPPLRGGPGGPGGPGGPMGRMGGRGGDRGGFPPRGPRGSRGNPSGGGNVQHRAGDWQCPNPGCGNQNFAWRTECNQCKAPKPEGFLPPPFPPPGGDRGRGGPGGMRGGRGGLMDRGGPGGMFRGGRGGDRGGFRGGRGMDRGGFGGGRRGGPGGPPGPLMEQDYKDDDDKGTEQKLISEEDLLATMDAQTRRRERRAEKQAQWKAANPPLDGAGAGAGAGAGAGGLATMDAQTRRRERRAEKQAQWKAANPPLDGAGAGAGAGAGAGGLATMDAQTRRRERRAEKQAQWKAANPPLDGAGAGAGAGAGAGGLATMDAQTRRRERRAEKQAQWKAANPPLESRGPV

SEQ ID NO: 151 - DNA, 4512 bp, Artificial Sequence
  Description of Artificial Sequence: Synthetic polynucleotide
  FUS-CD28-FUS-PylRS AF
  CDS (1)..(4512)
atgtgccgagccatctctcttaggcgcttgctgctgctgctgctgcagctgtcacaactcctagctgtcactcaagggatgctcatggcctcaaacgattatacccaacaagcaacccaaagctatggggcctaccccacccagcccgggcagggctattcccagcagagcagtcagccctacggacagcagagttacagtggttatagccagtccacggacacttcaggatatggccagagcagctattcttcttatggccagagccagaacacaggctatggaactcagtcaactccccagggatatggctcgactggcggctatggcagtagccagagctcccaatcgtcttacgggcagcagtcctcctaccctggctatggccagcagccagctcccagcagcacctcgggaagttacggtagcagttctcagagcagcagctatgggcagccccagagtgggagctacagccagcagcctagctatggtggacagcagcaaagctatggacagcagcaaagctataatccccctcagggctatggacagcagaaccagtacaacagcagcagtggtggtggaggtggaggtggaggtggaggtaactatggccaagatcaatcctccatgagtagtggtggtggcagtggtggcggttatggcaatcaagaccagagtggtggaggtggcagcggtggctatggacagcaggaccgtggaggccgcggcaggggtggcagtggtggcggcggcggcggcggcggtggtggttacaaccgcagcagtggtggctatgaacccagaggtcgtggaggtggccgtggaggcagaggtggcatgggcggaagtgaccgtggtggcttcaataaatttggtggccctcgggaccaaggatcacgtcatgactccgaacaggataattcagacaacaacaccatctttgtgcaaggcctgggtgagaatgttacaattgagtctgtggctgattacttcaagcagattggtattattaagacaaacaagaaaacgggacagcccatgattaatttgtacacagacagggaaactggcaagctgaagggagaggcaacggtctcttttgatgacccaccttcagctaaagcagctattgactggtttgatggtaaagaattctccggaaatcctatcaaggtctcatttgctactcgccgggcagactttaatcggggtggtggcaatggtcgtggaggccgagggcgaggaggacccatgggccgtggaggctatggaggtggtggcagtggtggtggtggccgaggaggatttcccagtggaggtggtggcggtggaggacagcagcgagctggtgactggaagtgtcctaatcccacctgtgagaatatgaacttctcttggaggaatgaatgcaaccagtgtaaggcccctaaaccagatggcccaggagggggaccaggtggctctcacatggggggtaactacggggatgatcgtcgtggtggcagaggaggcggcaccggtaagcttttttgggcactggtcgtggttgctggagtcctgttttgttatggcttgctagtgacagtggctctttgtgttatctgggtaagatctggtatggcctcaaacgattatacccaacaagcaacccaaagctatggggcctaccccacccagcccgggcagggctattcccagcagagcagtcagccctacggacagcagagttacagtggttatagccagtccacggacacttcaggatatggccagagcagctattcttcttatggccagagccagaacacaggctatggaactcagtcaactccccagggatatggctcgactggcggctatggcagtagccagagctcccaatcgtcttacgggcagcagtcctcctaccctggctatggccagcagccagctcccagcagcacctcgggaagttacggtagcagttctcagagcagcagctatgggcagccccagagtgggagctacagccagcagcctagctatggtggacagcagcaaagctatggacagcagcaaagctataatccccctcagggctatggacagcagaaccagtacaacagcagcagtggtggtggaggtggaggtggaggtggaggtaactatggccaagatcaatcctccatgagtagtggtggtggcagtggtggcggttatggcaatcaagaccagagtggtggaggtggcagcggtggctatggacagcaggaccgtggaggccgcggcaggggtggcagtggtggcggcggcggcggcggcggtggtggttacaaccgcagcagtggtggctatgaacccagaggtcgtggaggtggccgtggaggcagaggtggcatgggcggaagtgaccgtggtggcttcaataaatttggtggccctcgggaccaaggatcacgtcatgactccgaacaggataattcagacaacaacaccatctttgtgcaaggcctgggtgagaatgttacaattgagtctgtggctgattacttcaagcagattggtattattaagacaaacaagaaaacgggacagcccatgattaatttgtacacagacagggaaactggcaagctgaagggagaggcaacggtctcttttgatgacccaccttcagctaaagcagctattgactggtttgatggtaaagaattctccggaaatcctatcaaggtctcatttgctactcgccgggcagactttaatcggggtggtggcaatggtcgtggaggccgagggcgaggaggacccatgggccgtggaggctatggaggtggtggcagtggtggtggtggccgaggaggatttcccagtggaggtggtggcggtggaggacagcagcgagctggtgactggaagtgtcctaatcccacctgtgagaatatgaacttctcttggaggaatgaatgcaaccagtgtaaggcccctaaaccagatggcccaggagggggaccaggtggctctcacatggggggtaactacggggatgatcgtcgtggtggcagaggaggcggcgcccccggctccgccggctccgccgccggctccggcatggcgtgcccggtgccgctgcagctgccgccgctggaacgcctgaccctggatgataaaaaaccgctgaataccctgatctctgctactggtctgtggatgagtcgtaccggaaccattcataaaatcaaacaccacgaggttagccgttcgaaaatctatattgagatggcgtgtggcgatcatctggttgtgaacaatagccgctcttctcgtacagcacgtgcactgcgtcaccacaaatatcgtaaaacctgtaaacgttgccgtgtgtccgatgaggatctgaacaaattcctgacaaaagccaatgaggaccaaacaagcgtgaaagtgaaagtcgttagcgctcctacccgtactaaaaaagcaatgccgaaatccgttgctcgtgcccctaaaccactggaaaacactgaagcagcacaggcacagccgtctggaagcaaattctctccggccattcctgtttctacccaggagtccgtttctgttccagcaagtgtgagcaccagcattagcagtattagcaccggtgccaccgctagcgccctggttaaaggcaataccaatccgattacaagcatgtctgccccggttcaagcatcagctccagcactgacaaaatcccaaaccgatcgtctggaggttctgctgaatccgaaagacgaaatcagcctgaattccggcaaaccgtttcgtgaactggagagcgaactgctgtcacgtcgtaaaaaagacctgcaacaaatctatgccgaagaacgtgagaactatctggggaaactggaacgtgaaatcacccgctttttcgtggatcgtggctttctggagatcaaatccccgattctgattcctctggagtatatcgagcgtatgggcatcgacaatgataccgaactgagcaaacaaattttccgtgtggataaaaacttctgtctgcgccctatgctagcaccaaatctggctaactatctgcgcaaactggaccgtgccctgcctgatcctatcaaaatcttcgagatcggcccgtgttatcgtaaagagtccgacggtaaagaacatctggaggagtttaccatgctgaacttttgccaaatgggttcaggttgtactcgtgagaacctggaaagcatcatcaccgattttctgaaccacctgggcattgacttcaaaattgtgggcgacagctgtatggtgtttggcgacaccctggatgtcatgcacggcgacctggaactgtctagtgccgttgtgggcccaatcccgctggatcgtgagtggggtatcgacaaaccttggatcggtgcgggttttggtctggagcgtctgctgaaagtaaaacacgacttcaagaacatcaaacgtgctgcacgttccgagtcctattacaatggtatttctactaacctgtaa

SEQ ID NO: 152 - protein, 1503 aa, Artificial Sequence
  Description of Artificial Sequence: Synthetic polypeptide
  FUS-CD28-FUS-PylRS AF
MCRAISLRRLLLLLLQLSQLLAVTQGMLMASNDYTQQATQSYGAYPTQPGQGYSQQSSQPYGQQSYSGYSQSTDTSGYGQSSYSSYGQSQNTGYGTQSTPQGYGSTGGYGSSQSSQSSYGQQSSYPGYGQQPAPSSTSGSYGSSSQSSSYGQPQSGSYSQQPSYGGQQQSYGQQQSYNPPQGYGQQNQYNSSSGGGGGGGGGGNYGQDQSSMSSGGGSGGGYGNQDQSGGGGSGGYGQQDRGGRGRGGSGGGGGGGGGGYNRSSGGYEPRGRGGGRGGRGGMGGSDRGGFNKFGGPRDQGSRHDSEQDNSDNNTIFVQGLGENVTIESVADYFKQIGIIKTNKKTGQPMINLYTDRETGKLKGEATVSFDDPPSAKAAIDWFDGKEFSGNPIKVSFATRRADFNRGGGNGRGGRGRGGPMGRGGYGGGGSGGGGRGGFPSGGGGGGGQQRAGDWKCPNPTCENMNFSWRNECNQCKAPKPDGPGGGPGGSHMGGNYGDDRRGGRGGGTGKLFWALVVVAGVLFCYGLLVTVALCVIWVRSGMASNDYTQQATQSYGAYPTQPGQGYSQQSSQPYGQQSYSGYSQSTDTSGYGQSSYSSYGQSQNTGYGTQSTPQGYGSTGGYGSSQSSQSSYGQQSSYPGYGQQPAPSSTSGSYGSSSQSSSYGQPQSGSYSQQPSYGGQQQSYGQQQSYNPPQGYGQQNQYNSSSGGGGGGGGGGNYGQDQSSMSSGGGSGGGYGNQDQSGGGGSGGYGQQDRGGRGRGGSGGGGGGGGGGYNRSSGGYEPRGRGGGRGGRGGMGGSDRGGFNKFGGPRDQGSRHDSEQDNSDNNTIFVQGLGENVTIESVADYFKQIGIIKTNKKTGQPMINLYTDRETGKLKGEATVSFDDPPSAKAAIDWFDGKEFSGNPIKVSFATRRADFNRGGGNGRGGRGRGGPMGRGGYGGGGSGGGGRGGFPSGGGGGGGQQRAGDWKCPNPTCENMNFSWRNECNQCKAPKPDGPGGGPGGSHMGGNYGDDRRGGRGGGAPGSAGSAAGSGMACPVPLQLPPLERLTLDDKKPLNTLISATGLWMSRTGTIHKIKHHEVSRSKIYIEMACGDHLVVNNSRSSRTARALRHHKYRKTCKRCRVSDEDLNKFLTKANEDQTSVKVKVVSAPTRTKKAMPKSVARAPKPLENTEAAQAQPSGSKFSPAIPVSTQESVSVPASVSTSISSISTGATASALVKGNTNPITSMSAPVQASAPALTKSQTDRLEVLLNPKDEISLNSGKPFRELESELLSRRKKDLQQIYAEERENYLGKLEREITRFFVDRGFLEIKSPILIPLEYIERMGIDNDTELSKQIFRVDKNFCLRPMLAPNLANYLRKLDRALPDPIKIFEIGPCYRKESDGKEHLEEFTMLNFCQMGSGCTRENLESIITDFLNHLGIDFKIVGDSCMVFGDTLDVMHGDLELSSAVVGPIPLDREWGIDKPWIGAGFGLERLLKVKHDFKNIKRAARSESYYNGISTNL

SEQ ID NO: 153 - DNA, 4512 bp, Artificial Sequence
  Description of Artificial Sequence: Synthetic polynucleotide
  FUS-CD28-FUS-PylRS AA
  CDS (1)..(4512)
atgtgccgagccatctctcttaggcgcttgctgctgctgctgctgcagctgtcacaactcctagctgtcactcaagggatgctcatggcctcaaacgattatacccaacaagcaacccaaagctatggggcctaccccacccagcccgggcagggctattcccagcagagcagtcagccctacggacagcagagttacagtggttatagccagtccacggacacttcaggatatggccagagcagctattcttcttatggccagagccagaacacaggctatggaactcagtcaactccccagggatatggctcgactggcggctatggcagtagccagagctcccaatcgtcttacgggcagcagtcctcctaccctggctatggccagcagccagctcccagcagcacctcgggaagttacggtagcagttctcagagcagcagctatgggcagccccagagtgggagctacagccagcagcctagctatggtggacagcagcaaagctatggacagcagcaaagctataatccccctcagggctatggacagcagaaccagtacaacagcagcagtggtggtggaggtggaggtggaggtggaggtaactatggccaagatcaatcctccatgagtagtggtggtggcagtggtggcggttatggcaatcaagaccagagtggtggaggtggcagcggtggctatggacagcaggaccgtggaggccgcggcaggggtggcagtggtggcggcggcggcggcggcggtggtggttacaaccgcagcagtggtggctatgaacccagaggtcgtggaggtggccgtggaggcagaggtggcatgggcggaagtgaccgtggtggcttcaataaatttggtggccctcgggaccaaggatcacgtcatgactccgaacaggataattcagacaacaacaccatctttgtgcaaggcctgggtgagaatgttacaattgagtctgtggctgattacttcaagcagattggtattattaagacaaacaagaaaacgggacagcccatgattaatttgtacacagacagggaaactggcaagctgaagggagaggcaacggtctcttttgatgacccaccttcagctaaagcagctattgactggtttgatggtaaagaattctccggaaatcctatcaaggtctcatttgctactcgccgggcagactttaatcggggtggtggcaatggtcgtggaggccgagggcgaggaggacccatgggccgtggaggctatggaggtggtggcagtggtggtggtggccgaggaggatttcccagtggaggtggtggcggtggaggacagcagcgagctggtgactggaagtgtcctaatcccacctgtgagaatatgaacttctcttggaggaatgaatgcaaccagtgtaaggcccctaaaccagatggcccaggagggggaccaggtggctctcacatggggggtaactacggggatgatcgtcgtggtggcagaggaggcggcaccggtaagcttttttgggcactggtcgtggttgctggagtcctgttttgttatggcttgctagtgacagtggctctttgtgttatctgggtaagatctggtatggcctcaaacgattatacccaacaagcaacccaaagctatggggcctaccccacccagcccgggcagggctattcccagcagagcagtcagccctacggacagcagagttacagtggttatagccagtccacggacacttcaggatatggccagagcagctattcttcttatggccagagccagaacacaggctatggaactcagtcaactccccagggatatggctcgactggcggctatggcagtagccagagctcccaatcgtcttacgggcagcagtcctcctaccctggctatggccagcagccagctcccagcagcacctcgggaagttacggtagcagttctcagagcagcagctatgggcagccccagagtgggagctacagccagcagcctagctatggtggacagcagcaaagctatggacagcagcaaagctataatccccctcagggctatggacagcagaaccagtacaacagcagcagtggtggtggaggtggaggtggaggtggaggtaactatggccaagatcaatcctccatgagtagtggtggtggcagtggtggcggttatggcaatcaagaccagagtggtggaggtggcagcggtggctatggacagcaggaccgtggaggccgcggcaggggtggcagtggtggcggcggcggcggcggcggtggtggttacaaccgcagcagtggtggctatgaacccagaggtcgtggaggtggccgtggaggcagaggtggcatgggcggaagtgaccgtggtggcttcaataaatttggtggccctcgggaccaaggatcacgtcatgactccgaacaggataattcagacaacaacaccatctttgtgcaaggcctgggtgagaatgttacaattgagtctgtggctgattacttcaagcagattggtattattaagacaaacaagaaaacgggacagcccatgattaatttgtacacagacagggaaactggcaagctgaagggagaggcaacggtctcttttgatgacccaccttcagctaaagcagctattgactggtttgatggtaaagaattctccggaaatcctatcaaggtctcatttgctactcgccgggcagactttaatcggggtggtggcaatggtcgtggaggccgagggcgaggaggacccatgggccgtggaggctatggaggtggtggcagtggtggtggtggccgaggaggatttcccagtggaggtggtggcggtggaggacagcagcgagctggtgactggaagtgtcctaatcccacctgtgagaatatgaacttctcttggaggaatgaatgcaaccagtgtaaggcccctaaaccagatggcccaggagggggaccaggtggctctcacatggggggtaactacggggatgatcgtcgtggtggcagaggaggcggcgcccccggctccgccggctccgccgccggctccggcatggcgtgcccggtgccgctgcagctgccgccgctggaacgcctgaccctggatgacaaaaaaccgctgaataccctgatctctgctactggtctgtggatgagtcgtaccggaaccattcataaaatcaaacaccacgaggttagccgttcgaaaatctatattgagatggcgtgtggcgatcatctggttgtgaacaatagccgctcttctcgtacagcacgtgcactgcgtcaccacaaatatcgtaaaacctgtaaacgttgccgtgtgtccgatgaggatctgaacaaattcctgacaaaagccaatgaggaccaaacaagcgtgaaagtgaaagtcgttagcgctcctacccgtactaaaaaagcaatgccgaaatccgttgctcgtgcccctaaaccactggaaaacactgaagcagcacaggcacagccgtctggaagcaaattctctccggccattcctgtttctacccaggagtccgtttctgttccagcaagtgtgagcaccagcattagcagtattagcaccggtgccaccgctagcgccctggttaaaggcaataccaatccgattacaagcatgtctgccccggttcaagcatcagctccagcactgacaaaatcccaaaccgatcgtctggaggttctgctgaatccgaaagacgaaatcagcctgaattccggcaaaccgtttcgtgaactggagagcgaactgctgtcacgtcgtaaaaaagacctgcaacaaatctatgccgaagaacgtgagaactatctggggaaactggaacgtgaaatcacccgctttttcgtggatcgtggctttctggagatcaaatccccgattctgattcctctggagtatatcgagcgtatgggcatcgacaatgataccgaactgagcaaacaaattttccgtgtggataaaaacttctgtctgcgccctatgctggcaccaaatctgtataactatctgcgcaaactggaccgtgccctgcctgatcctatcaaaatcttcgagatcggcccgtgttatcgtaaagagtccgacggtaaagaacatctggaggagtttaccatgctggcctttgcccaaatgggttcaggttgtactcgtgagaacctggaaagcatcatcaccgattttctgaaccacctgggcattgacttcaaaattgtgggcgacagctgtatggtgtatggcgacaccctggatgtcatgcacggcgacctggaactgtctagtgccgttgttggaccaattccgctggaccgtgagtggggtatcgacaaaccgtggatcggagcaggattcggtctggaacgcctgctgaaagtgaaacacgacttcaaaaacatcaaacgtgccgcccgttctgaatcgtattataacgggatctctacgaacctgtaa

SEQ ID NO: 154 - protein, 1503 aa, Artificial Sequence
  Description of Artificial Sequence: Synthetic polypeptide
  FUS-CD28-FUS-PylRS AA
MCRAISLRRLLLLLLQLSQLLAVTQGMLMASNDYTQQATQSYGAYPTQPGQGYSQQSSQPYGQQSYSGYSQSTDTSGYGQSSYSSYGQSQNTGYGTQSTPQGYGSTGGYGSSQSSQSSYGQQSSYPGYGQQPAPSSTSGSYGSSSQSSSYGQPQSGSYSQQPSYGGQQQSYGQQQSYNPPQGYGQQNQYNSSSGGGGGGGGGGNYGQDQSSMSSGGGSGGGYGNQDQSGGGGSGGYGQQDRGGRGRGGSGGGGGGGGGGYNRSSGGYEPRGRGGGRGGRGGMGGSDRGGFNKFGGPRDQGSRHDSEQDNSDNNTIFVQGLGENVTIESVADYFKQIGIIKTNKKTGQPMINLYTDRETGKLKGEATVSFDDPPSAKAAIDWFDGKEFSGNPIKVSFATRRADFNRGGGNGRGGRGRGGPMGRGGYGGGGSGGGGRGGFPSGGGGGGGQQRAGDWKCPNPTCENMNFSWRNECNQCKAPKPDGPGGGPGGSHMGGNYGDDRRGGRGGGTGKLFWALVVVAGVLFCYGLLVTVALCVIWVRSGMASNDYTQQATQSYGAYPTQPGQGYSQQSSQPYGQQSYSGYSQSTDTSGYGQSSYSSYGQSQNTGYGTQSTPQGYGSTGGYGSSQSSQSSYGQQSSYPGYGQQPAPSSTSGSYGSSSQSSSYGQPQSGSYSQQPSYGGQQQSYGQQQSYNPPQGYGQQNQYNSSSGGGGGGGGGGNYGQDQSSMSSGGGSGGGYGNQDQSGGGGSGGYGQQDRGGRGRGGSGGGGGGGGGGYNRSSGGYEPRGRGGGRGGRGGMGGSDRGGFNKFGGPRDQGSRHDSEQDNSDNNTIFVQGLGENVTIESVADYFKQIGIIKTNKKTGQPMINLYTDRETGKLKGEATVSFDDPPSAKAAIDWFDGKEFSGNPIKVSFATRRADFNRGGGNGRGGRGRGGPMGRGGYGGGGSGGGGRGGFPSGGGGGGGQQRAGDWKCPNPTCENMNFSWRNECNQCKAPKPDGPGGGPGGSHMGGNYGDDRRGGRGGGAPGSAGSAAGSGMACPVPLQLPPLERLTLDDKKPLNTLISATGLWMSRTGTIHKIKHHEVSRSKIYIEMACGDHLVVNNSRSSRTARALRHHKYRKTCKRCRVSDEDLNKFLTKANEDQTSVKVKVVSAPTRTKKAMPKSVARAPKPLENTEAAQAQPSGSKFSPAIPVSTQESVSVPASVSTSISSISTGATASALVKGNTNPITSMSAPVQASAPALTKSQTDRLEVLLNPKDEISLNSGKPFRELESELLSRRKKDLQQIYAEERENYLGKLEREITRFFVDRGFLEIKSPILIPLEYIERMGIDNDTELSKQIFRVDKNFCLRPMLAPNLYNYLRKLDRALPDPIKIFEIGPCYRKESDGKEHLEEFTMLAFAQMGSGCTRENLESIITDFLNHLGIDFKIVGDSCMVYGDTLDVMHGDLELSSAVVGPIPLDREWGIDKPWIGAGFGLERLLKVKHDFKNIKRAARSESYYNGISTNL

SEQ ID NO: 155 - DNA, 4932 bp, Artificial Sequence
  Description of Artificial Sequence: Synthetic polynucleotide
  FUS-CD28-FUS-MCP-PylRS AF
  CDS (1)..(4932)
atgtgccgagccatctctcttaggcgcttgctgctgctgctgctgcagctgtcacaactcctagctgtcactcaagggatgctcatggcctcaaacgattatacccaacaagcaacccaaagctatggggcctaccccacccagcccgggcagggctattcccagcagagcagtcagccctacggacagcagagttacagtggttatagccagtccacggacacttcaggatatggccagagcagctattcttcttatggccagagccagaacacaggctatggaactcagtcaactccccagggatatggctcgactggcggctatggcagtagccagagctcccaatcgtcttacgggcagcagtcctcctaccctggctatggccagcagccagctcccagcagcacctcgggaagttacggtagcagttctcagagcagcagctatgggcagccccagagtgggagctacagccagcagcctagctatggtggacagcagcaaagctatggacagcagcaaagctataatccccctcagggctatggacagcagaaccagtacaacagcagcagtggtggtggaggtggaggtggaggtggaggtaactatggccaagatcaatcctccatgagtagtggtggtggcagtggtggcggttatggcaatcaagaccagagtggtggaggtggcagcggtggctatggacagcaggaccgtggaggccgcggcaggggtggcagtggtggcggcggcggcggcggcggtggtggttacaaccgcagcagtggtggctatgaacccagaggtcgtggaggtggccgtggaggcagaggtggcatgggcggaagtgaccgtggtggcttcaataaatttggtggccctcgggaccaaggatcacgtcatgactccgaacaggataattcagacaacaacaccatctttgtgcaaggcctgggtgagaatgttacaattgagtctgtggctgattacttcaagcagattggtattattaagacaaacaagaaaacgggacagcccatgattaatttgtacacagacagggaaactggcaagctgaagggagaggcaacggtctcttttgatgacccaccttcagctaaagcagctattgactggtttgatggtaaagaattctccggaaatcctatcaaggtctcatttgctactcgccgggcagactttaatcggggtggtggcaatggtcgtggaggccgagggcgaggaggacccatgggccgtggaggctatggaggtggtggcagtggtggtggtggccgaggaggatttcccagtggaggtggtggcggtggaggacagcagcgagctggtgactggaagtgtcctaatcccacctgtgagaatatgaacttctcttggaggaatgaatgcaaccagtgtaaggcccctaaaccagatggcccaggagggggaccaggtggctctcacatggggggtaactacggggatgatcgtcgtggtggcagaggaggcggcaccggtaagcttttttgggcactggtcgtggttgctggagtcctgttttgttatggcttgctagtgacagtggctctttgtgttatctgggtaagatctggtatggcctcaaacgattatacccaacaagcaacccaaagctatggggcctaccccacccagcccgggcagggctattcccagcagagcagtcagccctacggacagcagagttacagtggttatagccagtccacggacacttcaggatatggccagagcagctattcttcttatggccagagccagaacacaggctatggaactcagtcaactccccagggatatggctcgactggcggctatggcagtagccagagctcccaatcgtcttacgggcagcagtcctcctaccctggctatggccagcagccagctcccagcagcacctcgggaagttacggtagcagttctcagagcagcagctatgggcagccccagagtgggagctacagccagcagcctagctatggtggacagcagcaaagctatggacagcagcaaagctataatccccctcagggctatggacagcagaaccagtacaacagcagcagtggtggtggaggtggaggtggaggtggaggtaactatggccaagatcaatcctccatgagtagtggtggtggcagtggtggcggttatggcaatcaagaccagagtggtggaggtggcagcggtggctatggacagcaggaccgtggaggccgcggcaggggtggcagtggtggcggcggcggcggcggcggtggtggttacaaccgcagcagtggtggctatgaacccagaggtcgtggaggtggccgtggaggcagaggtggcatgggcggaagtgaccgtggtggcttcaataaatttggtggccctcgggaccaaggatcacgtcatgactccgaacaggataattcagacaacaacaccatctttgtgcaaggcctgggtgagaatgttacaattgagtctgtggctgattacttcaagcagattggtattattaagacaaacaagaaaacgggacagcccatgattaatttgtacacagacagggaaactggcaagctgaagggagaggcaacggtctcttttgatgacccaccttcagctaaagcagctattgactggtttgatggtaaagaattctccggaaatcctatcaaggtctcatttgctactcgccgggcagactttaatcggggtggtggcaatggtcgtggaggccgagggcgaggaggacccatgggccgtggaggctatggaggtggtggcagtggtggtggtggccgaggaggatttcccagtggaggtggtggcggtggaggacagcagcgagctggtgactggaagtgtcctaatcccacctgtgagaatatgaacttctcttggaggaatgaatgcaaccagtgtaaggcccctaaaccagatggcccaggagggggaccaggtggctctcacatggggggtaactacggggatgatcgtcgtggtggcagaggaggcgattacaaggatgacgacgataagggtaccggcgcccccggctccgccggctccgccgccggctccggcgcttctaactttactcagttcgttctcgtcgacaatggcggaactggcgacgtgactgtcgccccaagcaacttcgctaacgggatcgctgaatggatcagctctaactcgcgttcacaggcttacaaagtaacctgtagcgttcgtcagagctctgcgcagaatcgcaaatacaccatcaaagtcgaggtgcctaaaggcgcctggcgttcgtacttaaatatggaactaaccattccaattttcgccacgaattccgactgcgagcttattgttaaggcaatgcaaggtctcctaaaagatggaaacccgattccctcagcaatcgcagcaaactccggcatctacggtaccggcgcccccggctccgccggctccgccgccggctccggcgcgtgcccggtgccgctgcagctgccgccgctggaacgcctgaccctggatgataaaaaaccgctgaataccctgatctctgctactggtctgtggatgagtcgtaccggaaccattcataaaatcaaacaccacgaggttagccgttcgaaaatctatattgagatggcgtgtggcgatcatctggttgtgaacaatagccgctcttctcgtacagcacgtgcactgcgtcaccacaaatatcgtaaaacctgtaaacgttgccgtgtgtccgatgaggatctgaacaaattcctgacaaaagccaatgaggaccaaacaagcgtgaaagtgaaagtcgttagcgctcctacccgtactaaaaaagcaatgccgaaatccgttgctcgtgcccctaaaccactggaaaacactgaagcagcacaggcacagccgtctggaagcaaattctctccggccattcctgtttctacccaggagtccgtttctgttccagcaagtgtgagcaccagcattagcagtattagcaccggtgccaccgctagcgccctggttaaaggcaataccaatccgattacaagcatgtctgccccggttcaagcatcagctccagcactgacaaaatcccaaaccgatcgtctggaggttctgctgaatccgaaagacgaaatcagcctgaattccggcaaaccgtttcgtgaactggagagcgaactgctgtcacgtcgtaaaaaagacctgcaacaaatctatgccgaagaacgtgagaactatctggggaaactggaacgtgaaatcacccgctttttcgtggatcgtggctttctggagatcaaatccccgattctgattcctctggagtatatcgagcgtatgggcatcgacaatgataccgaactgagcaaacaaattttccgtgtggataaaaacttctgtctgcgccctatgctagcaccaaatctggctaactatctgcgcaaactggaccgtgccctgcctgatcctatcaaaatcttcgagatcggcccgtgttatcgtaaagagtccgacggtaaagaacatctggaggagtttaccatgctgaacttttgccaaatgggttcaggttgtactcgtgagaacctggaaagcatcatcaccgattttctgaaccacctgggcattgacttcaaaattgtgggcgacagctgtatggtgtttggcgacaccctggatgtcatgcacggcgacctggaactgtctagtgccgttgtgggcccaatcccgctggatcgtgagtggggtatcgacaaaccttggatcggtgcgggttttggtctggagcgtctgctgaaagtaaaacacgacttcaagaacatcaaacgtgctgcacgttccgagtcctattacaatggtatttctactaacctgtaa

SEQ ID NO: 156 - protein, 1643 aa, Artificial Sequence
  Description of Artificial Sequence: Synthetic polypeptide
  FUS-CD28-FUS-MCP-PylRS AF
MCRAISLRRLLLLLLQLSQLLAVTQGMLMASNDYTQQATQSYGAYPTQPGQGYSQQSSQPYGQQSYSGYSQSTDTSGYGQSSYSSYGQSQNTGYGTQSTPQGYGSTGGYGSSQSSQSSYGQQSSYPGYGQQPAPSSTSGSYGSSSQSSSYGQPQSGSYSQQPSYGGQQQSYGQQQSYNPPQGYGQQNQYNSSSGGGGGGGGGGNYGQDQSSMSSGGGSGGGYGNQDQSGGGGSGGYGQQDRGGRGRGGSGGGGGGGGGGYNRSSGGYEPRGRGGGRGGRGGMGGSDRGGFNKFGGPRDQGSRHDSEQDNSDNNTIFVQGLGENVTIESVADYFKQIGIIKTNKKTGQPMINLYTDRETGKLKGEATVSFDDPPSAKAAIDWFDGKEFSGNPIKVSFATRRADFNRGGGNGRGGRGRGGPMGRGGYGGGGSGGGGRGGFPSGGGGGGGQQRAGDWKCPNPTCENMNFSWRNECNQCKAPKPDGPGGGPGGSHMGGNYGDDRRGGRGGGTGKLFWALVVVAGVLFCYGLLVTVALCVIWVRSGMASNDYTQQATQSYGAYPTQPGQGYSQQSSQPYGQQSYSGYSQSTDTSGYGQSSYSSYGQSQNTGYGTQSTPQGYGSTGGYGSSQSSQSSYGQQSSYPGYGQQPAPSSTSGSYGSSSQSSSYGQPQSGSYSQQPSYGGQQQSYGQQQSYNPPQGYGQQNQYNSSSGGGGGGGGGGNYGQDQSSMSSGGGSGGGYGNQDQSGGGGSGGYGQQDRGGRGRGGSGGGGGGGGGGYNRSSGGYEPRGRGGGRGGRGGMGGSDRGGFNKFGGPRDQGSRHDSEQDNSDNNTIFVQGLGENVTIESVADYFKQIGIIKTNKKTGQPMINLYTDRETGKLKGEATVSFDDPPSAKAAIDWFDGKEFSGNPIKVSFATRRADFNRGGGNGRGGRGRGGPMGRGGYGGGGSGGGGRGGFPSGGGGGGGQQRAGDWKCPNPTCENMNFSWRNECNQCKAPKPDGPGGGPGGSHMGGNYGDDRRGGRGGDYKDDDDKGTGAPGSAGSAAGSGASNFTQFVLVDNGGTGDVTVAPSNFANGIAEWISSNSRSQAYKVTCSVRQSSAQNRKYTIKVEVPKGAWRSYLNMELTIPIFATNSDCELIVKAMQGLLKDGNPIPSAIAANSGIYGTGAPGSAGSAAGSGACPVPLQLPPLERLTLDDKKPLNTLISATGLWMSRTGTIHKIKHHEVSRSKIYIEMACGDHLVVNNSRSSRTARALRHHKYRKTCKRCRVSDEDLNKFLTKANEDQTSVKVKVVSAPTRTKKAMPKSVARAPKPLENTEAAQAQPSGSKFSPAIPVSTQESVSVPASVSTSISSISTGATASALVKGNTNPITSMSAPVQASAPALTKSQTDRLEVLLNPKDEISLNSGKPFRELESELLSRRKKDLQQIYAEERENYLGKLEREITRFFVDRGFLEIKSPILIPLEYIERMGIDNDTELSKQIFRVDKNFCLRPMLAPNLANYLRKLDRALPDPIKIFEIGPCYRKESDGKEHLEEFTMLNFCQMGSGCTRENLESIITDFLNHLGIDFKIVGDSCMVFGDTLDVMHGDLELSSAVVGPIPLDREWGIDKPWIGAGFGLERLLKVKHDFKNIKRAARSESYYNGISTNL

SEQ ID NO: 157 - DNA, 4512 bp, Artificial Sequence; identical to SEQ ID NO: 153
  Description of Artificial Sequence: Synthetic polynucleotide
  FUS-CD28-FUS-MCP-PylRS AA
  CDS (1)..(4512)

SEQ ID NO: 158 - protein, 1503 aa, Artificial Sequence; identical to SEQ ID NO: 154
  Description of Artificial Sequence: Synthetic polypeptide
  FUS-CD28-FUS-MCP-PylRS AA

SEQ ID NO: 159 - DNA, 3954 bp, Artificial Sequence
  Description of Artificial Sequence: Synthetic polynucleotide
  FUS-CD28-EWSR1-MCP
  CDS (1)..(3954)
atgtgccgagccatctctcttaggcgcttgctgctgctgctgctgcagctgtcacaactcctagctgtcactcaagggatgctcatggcctcaaacgattatacccaacaagcaacccaaagctatggggcctaccccacccagcccgggcagggctattcccagcagagcagtcagccctacggacagcagagttacagtggttatagccagtccacggacacttcaggatatggccagagcagctattcttcttatggccagagccagaacacaggctatggaactcagtcaactccccagggatatggctcgactggcggctatggcagtagccagagctcccaatcgtcttacgggcagcagtcctcctaccctggctatggccagcagccagctcccagcagcacctcgggaagttacggtagcagttctcagagcagcagctatgggcagccccagagtgggagctacagccagcagcctagctatggtggacagcagcaaagctatggacagcagcaaagctataatccccctcagggctatggacagcagaaccagtacaacagcagcagtggtggtggaggtggaggtggaggtggaggtaactatggccaagatcaatcctccatgagtagtggtggtggcagtggtggcggttatggcaatcaagaccagagtggtggaggtggcagcggtggctatggacagcaggaccgtggaggccgcggcaggggtggcagtggtggcggcggcggcggcggcggtggtggttacaaccgcagcagtggtggctatgaacccagaggtcgtggaggtggccgtggaggcagaggtggcatgggcggaagtgaccgtggtggcttcaataaatttggtggccctcgggaccaaggatcacgtcatgactccgaacaggataattcagacaacaacaccatctttgtgcaaggcctgggtgagaatgttacaattgagtctgtggctgattacttcaagcagattggtattattaagacaaacaagaaaacgggacagcccatgattaatttgtacacagacagggaaactggcaagctgaagggagaggcaacggtctcttttgatgacccaccttcagctaaagcagctattgactggtttgatggtaaagaattctccggaaatcctatcaaggtctcatttgctactcgccgggcagactttaatcggggtggtggcaatggtcgtggaggccgagggcgaggaggacccatgggccgtggaggctatggaggtggtggcagtggtggtggtggccgaggaggatttcccagtggaggtggtggcggtggaggacagcagcgagctggtgactggaagtgtcctaatcccacctgtgagaatatgaacttctcttggaggaatgaatgcaaccagtgtaaggcccctaaaccagatggcccaggagggggaccaggtggctctcacatggggggtaactacggggatgatcgtcgtggtggcagaggaggcggcaccggtaagcttttttgggcactggtcgtggttgctggagtcctgttttgttatggcttgctagtgacagtggctctttgtgttatctgggtaagatctatggcgtccacggattacagtacctatagccaagctgcagcgcagcagggctacagtgcttacaccgcccagcccactcaaggatatgcacagaccacccaggcatatgggcaacaaagctatggaacctatggacagcccactgatgtcagctatacccaggctcagaccactgcaacctatgggcagaccgcctatgcaacttcttatggacagcctcccactggttatactactccaactgccccccaggcatacagccagcctgtccaggggtatggcactggtgcttatgataccaccactgctacagtcaccaccacccaggcctcctatgcagctcagtctgcatatggcactcagcctgcttatccagcctatgggcagcagccagcagccactgcacctacaagaccgcaggatggaaacaagcccactgagactagtcaacctcaatctagcacagggggttacaaccagcccagcctaggatatggacagagtaactacagttatccccaggtacctgggagctaccccatgcagccagtcactgcacctccatcctaccctcctaccagctattcctctacacagccgactagttatgatcagagcagttactctcagcagaacacctatgggcaaccgagcagctatggacagcagagtagctatggtcaacaaagcagctatgggcagcagcctcccactagttacccaccccaaactggatcctacagccaagctccaagtcaatatagccaacagagcagcagctacgggcagcagagttcattccgacaggaccaccccagtagcatgggtgtttatgggcaggagtctggaggattttccggaccaggagagaaccggagcatgagtggccctgataaccggggcaggggaagagggggatttgatcgtggaggcatgagcagaggtgggcggggaggaggacgcggtggaatgggcagcgctggagagcgaggtggcttcaataagcctggtggacccatggatgaaggaccagatcttgatctaggcccacctgtagatccagatgaagactctgacaacagtgcaatttatgtacaaggattaaatgacagtgtgactctagatgatctggcagacttctttaagcagtgtggggttgttaagatgaacaagagaactgggcaacccatgatccacatctacctggacaaggaaacaggaaagcccaaaggcgatgccacagtgtcctatgaagacccacccactgccaaggctgccgtggaatggtttgatgggaaagattttcaagggagcaaacttaaagtctcccttgctcggaagaagcctccaatgaacagtatgcggggtggtctgccaccccgtgagggcagaggcatgccaccaccactccgtggaggtccaggaggcccaggaggtcctgggggacccatgggtcgcatgggaggccgtggaggagatagaggaggcttccctccaagaggaccccggggttcccgagggaacccctctggaggaggaaacgtccagcaccgagctggagactggcagtgtcccaatccgggttgtggaaaccagaacttcgcctggagaacagagtgcaaccagtgtaaggccccaaagcctgaaggcttcctcccgccaccctttccgcccccgggtggtgatcgtggcagaggtggccctggtggcatgcggggaggaagaggtggcctcatggatcgtggtggtcccggtggaatgttcagaggtggccgtggtggagacagaggtggcttccgtggtggccggggcatggaccgaggtggctttggtggaggaagacgaggtggccctggggggccccctggacctttgatggaacaggattacaaggatgacgacgataagggtaccgagcagaagctgatctcagaggaggacctgggcgcccccggctccgccggctccgccgccggctccggcgcttctaactttactcagttcgttctcgtcgacaatggcggaactggcgacgtgactgtcgccccaagcaacttcgctaacgggatcgctgaatggatcagctctaactcgcgttcacaggcttacaaagtaacctgtagcgttcgtcagagctctgcgcagaatcgcaaatacaccatcaaagtcgaggtgcctaaaggcgcctggcgttcgtacttaaatatggaactaaccattccaattttcgccacgaattccgactgcgagcttattgttaaggcaatgcaaggtctcctaaaagatggaaacccgattccctcagcaatcgcagcaaactccggcatctactaa

SEQ ID NO: 160 - protein, 1317 aa, Artificial Sequence
  Description of Artificial Sequence: Synthetic polypeptide
  FUS-CD28-EWSR1-MCP
MCRAISLRRLLLLLLQLSQLLAVTQGMLMASNDYTQQATQSYGAYPTQPGQGYSQQSSQPYGQQSYSGYSQSTDTSGYGQSSYSSYGQSQNTGYGTQSTPQGYGSTGGYGSSQSSQSSYGQQSSYPGYGQQPAPSSTSGSYGSSSQSSSYGQPQSGSYSQQPSYGGQQQSYGQQQSYNPPQGYGQQNQYNSSSGGGGGGGGGGNYGQDQSSMSSGGGSGGGYGNQDQSGGGGSGGYGQQDRGGRGRGGSGGGGGGGGGGYNRSSGGYEPRGRGGGRGGRGGMGGSDRGGFNKFGGPRDQGSRHDSEQDNSDNNTIFVQGLGENVTIESVADYFKQIGIIKTNKKTGQPMINLYTDRETGKLKGEATVSFDDPPSAKAAIDWFDGKEFSGNPIKVSFATRRADFNRGGGNGRGGRGRGGPMGRGGYGGGGSGGGGRGGFPSGGGGGGGQQRAGDWKCPNPTCENMNFSWRNECNQCKAPKPDGPGGGPGGSHMGGNYGDDRRGGRGGGTGKLFWALVVVAGVLFCYGLLVTVALCVIWVRSMASTDYSTYSQAAAQQGYSAYTAQPTQGYAQTTQAYGQQSYGTYGQPTDVSYTQAQTTATYGQTAYATSYGQPPTGYTTPTAPQAYSQPVQGYGTGAYDTTTATVTTTQASYAAQSAYGTQPAYPAYGQQPAATAPTRPQDGNKPTETSQPQSSTGGYNQPSLGYGQSNYSYPQVPGSYPMQPVTAPPSYPPTSYSSTQPTSYDQSSYSQQNTYGQPSSYGQQSSYGQQSSYGQQPPTSYPPQTGSYSQAPSQYSQQSSSYGQQSSFRQDHPSSMGVYGQESGGFSGPGENRSMSGPDNRGRGRGGFDRGGMSRGGRGGGRGGMGSAGERGGFNKPGGPMDEGPDLDLGPPVDPDEDSDNSAIYVQGLNDSVTLDDLADFFKQCGVVKMNKRTGQPMIHIYLDKETGKPKGDATVSYEDPPTAKAAVEWFDGKDFQGSKLKVSLARKKPPMNSMRGGLPPREGRGMPPPLRGGPGGPGGPGGPMGRMGGRGGDRGGFPPRGPRGSRGNPSGGGNVQHRAGDWQCPNPGCGNQNFAWRTECNQCKAPKPEGFLPPPFPPPGGDRGRGGPGGMRGGRGGLMDRGGPGGMFRGGRGGDRGGFRGGRGMDRGGFGGGRRGGPGGPPGPLMEQDYKDDDDKGTEQKLISEEDLGAPGSAGSAAGSGASNFTQFVLVDNGGTGDVTVAPSNFANGIAEWISSNSRSQAYKVTCSVRQSSAQNRKYTIKVEVPKGAWRSYLNMELTIPIFATNSDCELIVKAMQGLLKDGNPIPSAIAANSGIY

SEQ ID NO: 161 - DNA, 4056 bp, Artificial Sequence
  Description of Artificial Sequence: Synthetic polynucleotide
  FUS-CD28-EWSR1-4x Lambda N22
  CDS (1)..(4056)
atgtgccgagccatctctcttaggcgcttgctgctgctgctgctgcagctgtcacaactcctagctgtcactcaagggatgctcatggcctcaaacgattatacccaacaagcaacccaaagctatggggcctaccccacccagcccgggcagggctattcccagcagagcagtcagccctacggacagcagagttacagtggttatagccagtccacggacacttcaggatatggccagagcagctattcttcttatggccagagccagaacacaggctatggaactcagtcaactccccagggatatggctcgactggcggctatggcagtagccagagctcccaatcgtcttacgggcagcagtcctcctaccctggctatggccagcagccagctcccagcagcacctcgggaagttacggtagcagttctcagagcagcagctatgggcagccccagagtgggagctacagccagcagcctagctatggtggacagcagcaaagctatggacagcagcaaagctataatccccctcagggctatggacagcagaaccagtacaacagcagcagtggtggtggaggtggaggtggaggtggaggtaactatggccaagatcaatcctccatgagtagtggtggtggcagtggtggcggttatggcaatcaagaccagagtggtggaggtggcagcggtggctatggacagcaggaccgtggaggccgcggcaggggtggcagtggtggcggcggcggcggcggcggtggtggttacaaccgcagcagtggtggctatgaacccagaggtcgtggaggtggccgtggaggcagaggtggcatgggcggaagtgaccgtggtggcttcaataaatttggtggccctcgggaccaaggatcacgtcatgactccgaacaggataattcagacaacaacaccatctttgtgcaaggcctgggtgagaatgttacaattgagtctgtggctgattacttcaagcagattggtattattaagacaaacaagaaaacgggacagcccatgattaatttgtacacagacagggaaactggcaagctgaagggagaggcaacggtctcttttgatgacccaccttcagctaaagcagctattgactggtttgatggtaaagaattctccggaaatcctatcaaggtctcatttgctactcgccgggcagactttaatcggggtggtggcaatggtcgtggaggccgagggcgaggaggacccatgggccgtggaggctatggaggtggtggcagtggtggtggtggccgaggaggatttcccagtggaggtggtggcggtggaggacagcagcgagctggtgactggaagtgtcctaatcccacctgtgagaatatgaacttctcttggaggaatgaatgcaaccagtgtaaggcccctaaaccagatggcccaggagggggaccaggtggctctcacatggggggtaactacggggatgatcgtcgtggtggcagaggaggcggcaccggtaagcttttttgggcactggtcgtggttgctggagtcctgttttgttatggcttgctagtgacagtggctctttgtgttatctgggtaagatctatggcgtccacggattacagtacctatagccaagctgcagcgcagcagggctacagtgcttacaccgcccagcccactcaaggatatgcacagaccacccaggcatatgggcaacaaagctatggaacctatggacagcccactgatgtcagctatacccaggctcagaccactgcaacctatgggcagaccgcctatgcaacttcttatggacagcctcccactggttatactactccaactgccccccaggcatacagccagcctgtccaggggtatggcactggtgcttatgataccaccactgctacagtcaccaccacccaggcctcctatgcagctcagtctgcatatggcactcagcctgcttatccagcctatgggcagcagccagcagccactgcacctacaagaccgcaggatggaaacaagcccactgagactagtcaacctcaatctagcacagggggttacaaccagcccagcctaggatatggacagagtaactacagttatccccaggtacctgggagctaccccatgcagccagtcactgcacctccatcctaccctcctaccagctattcctctacacagccgactagttatgatcagagcagttactctcagcagaacacctatgggcaaccgagcagctatggacagcagagtagctatggtcaacaaagcagctatgggcagcagcctcccactagttacccaccccaaactggatcctacagccaagctccaagtcaatatagccaacagagcagcagctacgggcagcagagttcattccgacaggaccaccccagtagcatgggtgtttatgggcaggagtctggaggattttccggaccaggagagaaccggagcatgagtggccctgataaccggggcaggggaagagggggatttgatcgtggaggcatgagcagaggtgggcggggaggaggacgcggtggaatgggcagcgctggagagcgaggtggcttcaataagcctggtggacccatggatgaaggaccagatcttgatctaggcccacctgtagatccagatgaagactctgacaacagtgcaatttatgtacaaggattaaatgacagtgtgactctagatgatctggcagacttctttaagcagtgtggggttgttaagatgaacaagagaactgggcaacccatgatccacatctacctggacaaggaaacaggaaagcccaaaggcgatgccacagtgtcctatgaagacccacctactgccaaggctgccgtggaatggtttgatgggaaagattttcaagggagcaaacttaaagtctcccttgctcggaagaagcctccaatgaacagtatgcggggtggtctgccaccccgtgagggcagaggcatgccaccaccactccgtggaggtccaggaggcccaggaggtcctgggggacccatgggtcgcatgggaggccgtggaggagatagaggaggcttccctccaagaggaccccggggttcccgagggaacccctctggaggaggaaacgtccagcaccgagctggagactggcagtgtcccaatccgggttgtggaaaccagaacttcgcctggagaacagagtgcaaccagtgtaaggccccaaagcctgaaggcttcctcccgccaccctttccgcccccgggtggtgatcgtggcagaggtggccctggtggcatgcggggaggaagaggtggcctcatggatcgtggtggtcccggtggaatgttcagaggtggccgtggtggagacagaggtggcttccgtggtggccggggcatggaccgaggtggctttggtggaggaagacgaggtggccctggggggccccctggacctttgatggaacaggattacaaggatgacgacgataagggtaccgagcagaagctgatctcagaggaggacctgctagccaccatggacgcacaaacacgacgacgtgagcgtcgcgctgagaaacaagctcaatggaaagctgcaaacccaccgctcgacggagccggagctggcgctggagctggagccggagctggcggtctagccaccatggacgcacaaacacgacgacgtgagcgtcgcgctgagaaacaagctcaatggaaagctgcaaacccaccgctcgacggagccggagctggcgctggagctggagccggagctggcggtctagccaccatggacgcacaaacacgacgacgtgagcgtcgcgctgagaaacaagctcaatggaaagctgcaaacccaccgctcgacggagccggagctggcgctggagctggagccggagctggcggtctagccaccatggacgcacaaacacgacgacgtgagcgtcgcgctgagaaacaagctcaatggaaagctgcaaacccaccgctcgagtctagagggcccgtttaa

SEQ ID NO: 162 - protein, 1351 aa, Artificial Sequence
  Description of Artificial Sequence: Synthetic polypeptide
  FUS-CD28-EWSR1-4x Lambda N22
MCRAISLRRLLLLLLQLSQLLAVTQGMLMASNDYTQQATQSYGAYPTQPGQGYSQQSSQPYGQQSYSGYSQSTDTSGYGQSSYSSYGQSQNTGYGTQSTPQGYGSTGGYGSSQSSQSSYGQQSSYPGYGQQPAPSSTSGSYGSSSQSSSYGQPQSGSYSQQPSYGGQQQSYGQQQSYNPPQGYGQQNQYNSSSGGGGGGGGGGNYGQDQSSMSSGGGSGGGYGNQDQSGGGGSGGYGQQDRGGRGRGGSGGGGGGGGGGYNRSSGGYEPRGRGGGRGGRGGMGGSDRGGFNKFGGPRDQGSRHDSEQDNSDNNTIFVQGLGENVTIESVADYFKQIGIIKTNKKTGQPMINLYTDRETGKLKGEATVSFDDPPSAKAAIDWFDGKEFSGNPIKVSFATRRADFNRGGGNGRGGRGRGGPMGRGGYGGGGSGGGGRGGFPSGGGGGGGQQRAGDWKCPNPTCENMNFSWRNECNQCKAPKPDGPGGGPGGSHMGGNYGDDRRGGRGGGTGKLFWALVVVAGVLFCYGLLVTVALCVIWVRSMASTDYSTYSQAAAQQGYSAYTAQPTQGYAQTTQAYGQQSYGTYGQPTDVSYTQAQTTATYGQTAYATSYGQPPTGYTTPTAPQAYSQPVQGYGTGAYDTTTATVTTTQASYAAQSAYGTQPAYPAYGQQPAATAPTRPQDGNKPTETSQPQSSTGGYNQPSLGYGQSNYSYPQVPGSYPMQPVTAPPSYPPTSYSSTQPTSYDQSSYSQQNTYGQPSSYGQQSSYGQQSSYGQQPPTSYPPQTGSYSQAPSQYSQQSSSYGQQSSFRQDHPSSMGVYGQESGGFSGPGENRSMSGPDNRGRGRGGFDRGGMSRGGRGGGRGGMGSAGERGGFNKPGGPMDEGPDLDLGPPVDPDEDSDNSAIYVQGLNDSVTLDDLADFFKQCGVVKMNKRTGQPMIHIYLDKETGKPKGDATVSYEDPPTAKAAVEWFDGKDFQGSKLKVSLARKKPPMNSMRGGLPPREGRGMPPPLRGGPGGPGGPGGPMGRMGGRGGDRGGFPPRGPRGSRGNPSGGGNVQHRAGDWQCPNPGCGNQNFAWRTECNQCKAPKPEGFLPPPFPPPGGDRGRGGPGGMRGGRGGLMDRGGPGGMFRGGRGGDRGGFRGGRGMDRGGFGGGRRGGPGGPPGPLMEQDYKDDDDKGTEQKLISEEDLLATMDAQTRRRERRAEKQAQWKAANPPLDGAGAGAGAGAGAGGLATMDAQTRRRERRAEKQAQWKAANPPLDGAGAGAGAGAGAGGLATMDAQTRRRERRAEKQAQWKAANPPLDGAGAGAGAGAGAGGLATMDAQTRRRERRAEKQAQWKAANPPLESRGPV

SEQ ID NO: 163 - DNA, 3768 bp, Artificial Sequence
  Description of Artificial Sequence: Synthetic polynucleotide
  FRB-CD28-FUS-MCP-PylRS AA
  CDS (1)..(3768)
atgtgccgagccatctctcttaggcgcttgctgctgctgctgctgcagctgtcacaactcctagctgtcactcaagggatgctcgagatgtggcatgaaggcctggaagaggcatctcgtttgtactttggggaaaggaacgtgaaaggcatgtttgaggtgctggagcccttgcatgctatgatggaacggggcccccagactctgaaggaaacatcctttaatcaggcctatggtcgagatttaatggaggcccaagagtggtgcaggaagtacatgaaatcagggaatgtcaaggacctcctccaagcctgggacctctattatcatgtgttccgacgaatctcaaagactagaaccggtaagcttttttgggcactggtcgtggttgctggagtcctgttttgttatggcttgctagtgacagtggctctttgtgttatctgggtaagatctggtatggcctcaaacgattatacccaacaagcaacccaaagctatggggcctaccccacccagcccgggcagggctattcccagcagagcagtcagccctacggacagcagagttacagtggttatagccagtccacggacacttcaggatatggccagagcagctattcttcttatggccagagccagaacacaggctatggaactcagtcaactccccagggatatggctcgactggcggctatggcagtagccagagctcccaatcgtcttacgggcagcagtcctcctaccctggctatggccagcagccagctcccagcagcacctcgggaagttacggtagcagttctcagagcagcagctatgggcagccccagagtgggagctacagccagcagcctagctatggtggacagcagcaaagctatggacagcagcaaagctataatccccctcagggctatggacagcagaaccagtacaacagcagcagtggtggtggaggtggaggtggaggtggaggtaactatggccaagatcaatcctccatgagtagtggtggtggcagtggtggcggttatggcaatcaagaccagagtggtggaggtggcagcggtggctatggacagcaggaccgtggaggccgcggcaggggtggcagtggtggcggcggcggcggcggcggtggtggttacaaccgcagcagtggtggctatgaacccagaggtcgtggaggtggccgtggaggcagaggtggcatgggcggaagtgaccgtggtggcttcaataaatttggtggccctcgggaccaaggatcacgtcatgactccgaacaggataattcagacaacaacaccatctttgtgcaaggcctgggtgagaatgttacaattgagtctgtggctgattacttcaagcagattggtattattaagacaaacaagaaaacgggacagcccatgattaatttgtacacagacagggaaactggcaagctgaagggagaggcaacggtctcttttgatgacccaccttcagctaaagcagctattgactggtttgatggtaaagaattctccggaaatcctatcaaggtctcatttgctactcgccgggcagactttaatcggggtggtggcaatggtcgtggaggccgagggcgaggaggacccatgggccgtggaggctatggaggtggtggcagtggtggtggtggccgaggaggatttcccagtggaggtggtggcggtggaggacagcagcgagctggtgactggaagtgtcctaatcccacctgtgagaatatgaacttctcttggaggaatgaatgcaaccagtgtaaggcccctaaaccagatggcccaggagggggaccaggtggctctcacatggggggtaactacggggatgatcgtcgtggtggcagaggaggcgattacaaggatgacgacgataagggtaccggcgcccccggctccgccggctccgccgccggctccggcgcttctaactttactcagttcgttctcgtcgacaatggcggaactggcgacgtgactgtcgccccaagcaacttcgctaacgggatcgctgaatggatcagctctaactcgcgttcacaggcttacaaagtaacctgtagcgttcgtcagagctctgcgcagaatcgcaaatacaccatcaaagtcgaggtgcctaaaggcgcctggcgttcgtacttaaatatggaactaaccattccaattttcgccacgaattccgactgcgagcttattgttaaggcaatgcaaggtctcctaaaagatggaaacccgattccctcagcaatcgcagcaaactccggcatctacggtaccggcgcccccggctccgccggctccgccgccggctccggcgcgtgcccggtgccgctgcagctgccgccgctggaacgcctgaccctggatgataaaaaaccgctgaataccctgatctctgctactggtctgtggatgagtcgtaccggaaccattcataaaatcaaacaccacgaggttagccgttcgaaaatctatattgagatggcgtgtggcgatcatctggttgtgaacaatagccgctcttctcgtacagcacgtgcactgcgtcaccacaaatatcgtaaaacctgtaaacgttgccgtgtgtccgatgaggatctgaacaaattcctgacaaaagccaatgaggaccaaacaagcgtgaaagtgaaagtcgttagcgctcctacccgtactaaaaaagcaatgccgaaatccgttgctcgtgcccctaaaccactggaaaacactgaagcagcacaggcacagccgtctggaagcaaattctctccggccattcctgtttctacccaggagtccgtttctgttccagcaagtgtgagcaccagcattagcagtattagcaccggtgccaccgctagcgccctggttaaaggcaataccaatccgattacaagcatgtctgccccggttcaagcatcagctccagcactgacaaaatcccaaaccgatcgtctggaggttctgctgaatccgaaagacgaaatcagcctgaattccggcaaaccgtttcgtgaactggagagcgaactgctgtcacgtcgtaaaaaagacctgcaacaaatctatgccgaagaacgtgagaactatctggggaaactggaacgtgaaatcacccgctttttcgtggatcgtggctttctggagatcaaatccccgattctgattcctctggagtatatcgagcgtatgggcatcgacaatgataccgaactgagcaaacaaattttccgtgtggataaaaacttctgtctgcgccctatgctggcaccaaatctgtataactatctgcgcaaactggaccgtgccctgcctgatcctatcaaaatcttcgagatcggcccgtgttatcgtaaagagtccgacggtaaagaacatctggaggagtttaccatgctggcctttgcccaaatgggttcaggttgtactcgtgagaacctggaaagcatcatcaccgattttctgaaccacctgggcattgacttcaaaattgtgggcgacagctgtatggtgtatggcgacaccctggatgtcatgcacggcgacctggaactgtctagtgccgttgttggaccaattccgctggaccgtgagtggggtatcgacaaaccgtggatcggagcaggattcggtctggaacgcctgctgaaagtgaaacacgacttcaaaaacatcaaacgtgccgcccgttctgaatcgtattataacgggatctctacgaacctgtaa

SEQ ID NO: 164 - protein, 1255 aa, Artificial Sequence
  Description of Artificial Sequence: Synthetic polypeptide
  FRB-CD28-FUS-MCP-PylRS AA
MCRAISLRRLLLLLLQLSQLLAVTQGMLEMWHEGLEEASRLYFGERNVKGMFEVLEPLHAMMERGPQTLKETSFNQAYGRDLMEAQEWCRKYMKSGNVKDLLQAWDLYYHVFRRISKTRTGKLFWALVVVAGVLFCYGLLVTVALCVIWVRSGMASNDYTQQATQSYGAYPTQPGQGYSQQSSQPYGQQSYSGYSQSTDTSGYGQSSYSSYGQSQNTGYGTQSTPQGYGSTGGYGSSQSSQSSYGQQSSYPGYGQQPAPSSTSGSYGSSSQSSSYGQPQSGSYSQQPSYGGQQQSYGQQQSYNPPQGYGQQNQYNSSSGGGGGGGGGGNYGQDQSSMSSGGGSGGGYGNQDQSGGGGSGGYGQQDRGGRGRGGSGGGGGGGGGGYNRSSGGYEPRGRGGGRGGRGGMGGSDRGGFNKFGGPRDQGSRHDSEQDNSDNNTIFVQGLGENVTIESVADYFKQIGIIKTNKKTGQPMINLYTDRETGKLKGEATVSFDDPPSAKAAIDWFDGKEFSGNPIKVSFATRRADFNRGGGNGRGGRGRGGPMGRGGYGGGGSGGGGRGGFPSGGGGGGGQQRAGDWKCPNPTCENMNFSWRNECNQCKAPKPDGPGGGPGGSHMGGNYGDDRRGGRGGDYKDDDDKGTGAPGSAGSAAGSGASNFTQFVLVDNGGTGDVTVAPSNFANGIAEWISSNSRSQAYKVTCSVRQSSAQNRKYTIKVEVPKGAWRSYLNMELTIPIFATNSDCELIVKAMQGLLKDGNPIPSAIAANSGIYGTGAPGSAGSAAGSGACPVPLQLPPLERLTLDDKKPLNTLISATGLWMSRTGTIHKIKHHEVSRSKIYIEMACGDHLVVNNSRSSRTARALRHHKYRKTCKRCRVSDEDLNKFLTKANEDQTSVKVKVVSAPTRTKKAMPKSVARAPKPLENTEAAQAQPSGSKFSPAIPVSTQESVSVPASVSTSISSISTGATASALVKGNTNPITSMSAPVQASAPALTKSQTDRLEVLLNPKDEISLNSGKPFRELESELLSRRKKDLQQIYAEERENYLGKLEREITRFFVDRGFLEIKSPILIPLEYIERMGIDNDTELSKQIFRVDKNFCLRPMLAPNLYNYLRKLDRALPDPIKIFEIGPCYRKESDGKEHLEEFTMLAFAQMGSGCTRENLESIITDFLNHLGIDFKIVGDSCMVYGDTLDVMHGDLELSSAVVGPIPLDREWGIDKPWIGAGFGLERLLKVKHDFKNIKRAARSESYYNGISTNL

SEQ ID NO: 165 - DNA, 3768 bp, Artificial Sequence
  Description of Artificial Sequence: Synthetic polynucleotide
  FRB-CD28-FUS-MCP-PylRS AF
  CDS (1)..(3768)
atgtgccgagccatctctcttaggcgcttgctgctgctgctgctgcagctgtcacaactcctagctgtcactcaagggatgctcgagatgtggcatgaaggcctggaagaggcatctcgtttgtactttggggaaaggaacgtgaaaggcatgtttgaggtgctggagcccttgcatgctatgatggaacggggcccccagactctgaaggaaacatcctttaatcaggcctatggtcgagatttaatggaggcccaagagtggtgcaggaagtacatgaaatcagggaatgtcaaggacctcctccaagcctgggacctctattatcatgtgttccgacgaatctcaaagactagaaccggtaagcttttttgggcactggtcgtggttgctggagtcctgttttgttatggcttgctagtgacagtggctctttgtgttatctgggtaagatctggtatggcctcaaacgattatacccaacaagcaacccaaagctatggggcctaccccacccagcccgggcagggctattcccagcagagcagtcagccctacggacagcagagttacagtggttatagccagtccacggacacttcaggatatggccagagcagctattcttcttatggccagagccagaacacaggctatggaactcagtcaactccccagggatatggctcgactggcggctatggcagtagccagagctcccaatcgtcttacgggcagcagtcctcctaccctggctatggccagcagccagctcccagcagcacctcgggaagttacggtagcagttctcagagcagcagctatgggcagccccagagtgggagctacagccagcagcctagctatggtggacagcagcaaagctatggacagcagcaaagctataatccccctcagggctatggacagcagaaccagtacaacagcagcagtggtggtggaggtggaggtggaggtggaggtaactatggccaagatcaatcctccatgagtagtggtggtggcagtggtggcggttatggcaatcaagaccagagtggtggaggtggcagcggtggctatggacagcaggaccgtggaggccgcggcaggggtggcagtggtggcggcggcggcggcggcggtggtggttacaaccgcagcagtggtggctatgaacccagaggtcgtggaggtggccgtggaggcagaggtggcatgggcggaagtgaccgtggtggcttcaataaatttggtggccctcgggaccaaggatcacgtcatgactccgaacaggataattcagacaacaacaccatctttgtgcaaggcctgggtgagaatgttacaattgagtctgtggctgattacttcaagcagattggtattattaagacaaacaagaaaacgggacagcccatgattaatttgtacacagacagggaaactggcaagctgaagggagaggcaacggtctcttttgatgacccaccttcagctaaagcagctattgactggtttgatggtaaagaattctccggaaatcctatcaaggtctcatttgctactcgccgggcagactttaatcggggtggtggcaatggtcgtggaggccgagggcgaggaggacccatgggccgtggaggctatggaggtggtggcagtggtggtggtggccgaggaggatttcccagtggaggtggtggcggtggaggacagcagcgagctggtgactggaagtgtcctaatcccacctgtgagaatatgaacttctcttggaggaatgaatgcaaccagtgtaaggcccctaaaccagatggcccaggagggggaccaggtggctctcacatggggggtaactacggggatgatcgtcgtggtggcagaggaggcgattacaaggatgacgacgataagggtaccggcgcccccggctccgccggctccgccgccggctccggcgcttctaactttactcagttcgttctcgtcgacaatggcggaactggcgacgtgactgtcgccccaagcaacttcgctaacgggatcgctgaatggatcagctctaactcgcgttcacaggcttacaaagtaacctgtagcgttcgtcagagctctgcgcagaatcgcaaatacaccatcaaagtcgaggtgcctaaaggcgcctggcgttcgtacttaaatatggaactaaccattccaattttcgccacgaattccgactgcgagcttattgttaaggcaatgcaaggtctcctaaaagatggaaacccgattccctcagcaatcgcagcaaactccggcatctacggtaccggcgcccccggctccgccggctccgccgccggctccggcgcgtgcccggtgccgctgcagctgccgccgctggaacgcctgaccctggatgataaaaaaccgctgaataccctgatctctgctactggtctgtggatgagtcgtaccggaaccattcataaaatcaaacaccacgaggttagccgttcgaaaatctatattgagatggcgtgtggcgatcatctggttgtgaacaatagccgctcttctcgtacagcacgtgcactgcgtcaccacaaatatcgtaaaacctgtaaacgttgccgtgtgtccgatgaggatctgaacaaattcctgacaaaagccaatgaggaccaaacaagcgtgaaagtgaaagtcgttagcgctcctacccgtactaaaaaagcaatgccgaaatccgttgctcgtgcccctaaaccactggaaaacactgaagcagcacaggcacagccgtctggaagcaaattctctccggccattcctgtttctacccaggagtccgtttctgttccagcaagtgtgagcaccagcattagcagtattagcaccggtgccaccgctagcgccctggttaaaggcaataccaatccgattacaagcatgtctgccccggttcaagcatcagctccagcactgacaaaatcccaaaccgatcgtctggaggttctgctgaatccgaaagacgaaatcagcctgaattccggcaaaccgtttcgtgaactggagagcgaactgctgtcacgtcgtaaaaaagacctgcaacaaatctatgccgaagaacgtgagaactatctggggaaactggaacgtgaaatcacccgctttttcgtggatcgtggctttctggagatcaaatccccgattctgattcctctggagtatatcgagcgtatgggcatcgacaatgataccgaactgagcaaacaaattttccgtgtggataaaaacttctgtctgcgccctatgctagcaccaaatctggctaactatctgcgcaaactggaccgtgccctgcctgatcctatcaaaatcttcgagatcggcccgtgttatcgtaaagagtccgacggtaaagaacatctggaggagtttaccatgctgaacttttgccaaatgggttcaggttgtactcgtgagaacctggaaagcatcatcaccgattttctgaaccacctgggcattgacttcaaaattgtgggcgacagctgtatggtgtttggcgacaccctggatgtcatgcacggcgacctggaactgtctagtgccgttgtgggcccaatcccgctggatcgtgagtggggtatcgacaaaccttggatcggtgcgggttttggtctggagcgtctgctgaaagtaaaacacgacttcaagaacatcaaacgtgctgcacgttccgagtcctattacaatggtatttctactaacctgtaa

SEQ ID NO: 166 - protein, 1255 aa, Artificial Sequence
  Description of Artificial Sequence: Synthetic polypeptide
  FRB-CD28-FUS-MCP-PylRS AF
MCRAISLRRLLLLLLQLSQLLAVTQGMLEMWHEGLEEASRLYFGERNVKGMFEVLEPLHAMMERGPQTLKETSFNQAYGRDLMEAQEWCRKYMKSGNVKDLLQAWDLYYHVFRRISKTRTGKLFWALVVVAGVLFCYGLLVTVALCVIWVRSGMASNDYTQQATQSYGAYPTQPGQGYSQQSSQPYGQQSYSGYSQSTDTSGYGQSSYSSYGQSQNTGYGTQSTPQGYGSTGGYGSSQSSQSSYGQQSSYPGYGQQPAPSSTSGSYGSSSQSSSYGQPQSGSYSQQPSYGGQQQSYGQQQSYNPPQGYGQQNQYNSSSGGGGGGGGGGNYGQDQSSMSSGGGSGGGYGNQDQSGGGGSGGYGQQDRGGRGRGGSGGGGGGGGGGYNRSSGGYEPRGRGGGRGGRGGMGGSDRGGFNKFGGPRDQGSRHDSEQDNSDNNTIFVQGLGENVTIESVADYFKQIGIIKTNKKTGQPMINLYTDRETGKLKGEATVSFDDPPSAKAAIDWFDGKEFSGNPIKVSFATRRADFNRGGGNGRGGRGRGGPMGRGGYGGGGSGGGGRGGFPSGGGGGGGQQRAGDWKCPNPTCENMNFSWRNECNQCKAPKPDGPGGGPGGSHMGGNYGDDRRGGRGGDYKDDDDKGTGAPGSAGSAAGSGASNFTQFVLVDNGGTGDVTVAPSNFANGIAEWISSNSRSQAYKVTCSVRQSSAQNRKYTIKVEVPKGAWRSYLNMELTIPIFATNSDCELIVKAMQGLLKDGNPIPSAIAANSGIYGTGAPGSAGSAAGSGACPVPLQLPPLERLTLDDKKPLNTLISATGLWMSRTGTIHKIKHHEVSRSKIYIEMACGDHLVVNNSRSSRTARALRHHKYRKTCKRCRVSDEDLNKFLTKANEDQTSVKVKVVSAPTRTKKAMPKSVARAPKPLENTEAAQAQPSGSKFSPAIPVSTQESVSVPASVSTSISSISTGATASALVKGNTNPITSMSAPVQASAPALTKSQTDRLEVLLNPKDEISLNSGKPFRELESELLSRRKKDLQQIYAEERENYLGKLEREITRFFVDRGFLEIKSPILIPLEYIERMGIDNDTELSKQIFRVDKNFCLRPMLAPNLANYLRKLDRALPDPIKIFEIGPCYRKESDGKEHLEEFTMLNFCQMGSGCTRENLESIITDFLNHLGIDFKIVGDSCMVFGDTLDVMHGDLELSSAVVGPIPLDREWGIDKPWIGAGFGLERLLKVKHDFKNIKRAARSESYYNGISTNL

SEQ ID NO: 167 - DNA, 3309 bp, Artificial Sequence; identical to SEQ ID NO: 41
  Description of Artificial Sequence: Synthetic polynucleotide
  FUS-MCP-PylRS AF
  CDS (1)..(3309)

SEQ ID NO: 168 - protein, 1102 aa, Artificial Sequence; identical to SEQ ID NO: 42
  Description of Artificial Sequence: Synthetic polypeptide
  FUS-MCP-PylRS AF

SEQ ID NO: 169 - DNA, 5475 bp, Artificial Sequence
  Description of Artificial Sequence: Synthetic polynucleotide
  SPD5-MCP-PylRS AF
  CDS (1)..(5475)
atggaggacaacagcgtgctgaacgaggacagcaacctggagcacgtggagggccagcccagaagaagcatgagccagcccgtgctgaacgtggagggcgacaagagaaccagcagcaccagcgccacccagcagcaggtgctgagcggcgccttcagcagcgccgacgtgagaagcatccccatcatccagacctgggaggagaacaaggccctgaagaccaagatcaccatcctgagaggcgagctgcagatgtaccagagaagatacagcgaggccaaggaggccagccagaagagagtgaaggaggtgatggacgactacgtggacctgaagctgggccaggagaacgtgcaggagaagatggagcagtacaagctgatggaggaggacctgctggccatgcagagcagaatcgagaccagcgaggacaacttcgccagacagatgaaggagttcgaggcccagaagcacgccatggaggagagaatcaaggagctggagctgagcgccaccgacgccaacaacaccaccgtgggcagcttcagaggcaccctggacgacatcctgaagaagaacgaccccgacttcaccctgaccagcggctacgaggagagaaagatcaacgacctggaggccaagctgctgagcgagatcgacaaggtggccgagctggaggaccacatccagcagctgagacaggagctggacgaccagagcgccagactggccgacagcgagaacgtgagagcccagctggaggccgccaccggccagggcatcctgggcgccgccggcaacgccatggtgcccaacagcaccttcatgatcggcaacggcagagagagccagaccagagaccagctgaactacatcgacgacctggagaccaagctggccgacgccaagaaggagaacgacaaggccagacaggccctggtggagtacatgaacaagtgcagcaagctggagcacgagatcagaaccatggtgaagaacagcaccttcgacagcagcagcatgctgctgggcggccagaccagcgacgagctgaagatccagatcggcaaggtgaacggcgagctgaacgtgctgagagccgagaacagagagctgagaatcagatgcgaccagctgaccggcggcgacggcaacctgagcatcagcctgggccagagcagactgatggccggcatcgccaccaacgacgtggacagcatcggccagggcaacgagaccggcggcaccagcatgagaatcctgcccagagagagccagctggacgacctggaggagagcaagctgcccctgatggacaccagcagcgccgtgagaaaccagcagcagttcgccagcatgtgggaggacttcgagagcgtgaaggacagcctgcagaacaaccacaacgacaccctggagggcagcttcaacagcagcatgcccccccccggcagagacgccacccagagcttcctgagccagaagagcttcaagaacagccccatcgtgatgcagaagcccaagagcctgcacctgcacctgaagagccaccagagcgagggcgccggcgagcagatccagaacaacagcttcagcaccaagaccgccagcccccacgtgagccagagccacatccccatcctgcacgacatgcagcagatcctggacagcagcgccatgttcctggagggccagcacgacgtggccgtgaacgtggagcagatgcaggagaagatgagccagatcagagaggccctggccagactgttcgagagactgaagagcagcgccgccctgttcgaggagatcctggagagaatgggcagcagcgaccccaacgccgacaagatcaagaagatgaagctggccttcgagaccagcatcaacgacaagctgaacgtgagcgccatcctggaggccgccgagaaggacctgcacaacatgagcctgaacttcagcatcctggagaagagcatcgtgagccaggccgccgaggccagcagaagattcaccatcgcccccgacgccgaggacgtggccagcagcagcctgctgaacgccagctacagccccctgttcaagttcaccagcaacagcgacatcgtggagaagctgcagaacgaggtgagcgagctgaagaacgagctggagatggccagaaccagagacatgagaagccccctgaacggcagcagcggcagactgagcgacgtgcagatcaacaccaacagaatgttcgaggacctggaggtgagcgaggccaccctgcagaaggccaaggaggagaacagcaccctgaagagccagttcgccgagctggaggccaacctgcaccaggtgaacagcaagctgggcgaggtgagatgcgagctgaacgaggccctggccagagtggacggcgagcaggagaccagagtgaaggccgagaacgccctggaggaggccagacagctgatcagcagcctgaagcacgaggagaacgagctgaagaagaccatcaccgacatgggcatgagactgaacgaggccaagaagagcgacgagttcctgaagagcgagctgagcaccgccctggaggaggagaagaagagccagaacctggccgacgagctgagcgaggagctgaacggctggagaatgagaaccaaggaggccgagaacaaggtggagcacgccagcagcgagaagagcgagatgctggagagaatcgtgcacctggagaccgagatggagaagctgagcaccagcgagatcgccgccgactactgcagcaccaagatgaccgagagaaagaaggagatcgagctggccaagtacagagaggacttcgagaacgccgccatcgtgggcctggagagaatcagcaaggagatcagcgagctgaccaagaagaccctgaaggccaagatcatccccagcaacatcagcagcatccagctggtgtgcgacgagctgtgcagaagactgagcagagagagagagcagcagcacgagtacgccaaggtgatgagagacgtgaacgagaagatcgagaagctgcagctggagaaggacgccctggagcacgagctgaagatgatgagcagcaacaacgagaacgtgccccccgtgggcaccagcgtgagcggcatgcccaccaagaccagcaaccagaagtgcgcccagccccactacaccagccccaccagacagctgctgcacgagagcaccatggccgtggacgccatcgtgcagaagctgaagaagacccacaacatgagcggcatgggccccgagctgaaggagaccatcggcaacgtgatcaacgagagcagagtgctgagagacttcctgcaccagaagctgatcctgttcaagggcatcgacatgagcaactggaagaacgagaccgtggaccagctgatcaccgacctgggccagctgcaccaggacaacctgatgctggaggagcagatcaagaagtacaagaaggagctgaagctgaccaagagcgccatccccaccctgggcgtggagttccaggacagaatcaagaccgagatcggcaagatcgccaccgacatgggcggcgccgtgaaggagatcagaaagaagggtaccgagcagaagctgatctcagaggaggacctgggcgcccccggctccgccggctccgccgccggctccggcgcttctaactttactcagttcgttctcgtcgacaatggcggaactggcgacgtgactgtcgccccaagcaacttcgctaacgggatcgctgaatggatcagctctaactcgcgttcacaggcttacaaagtaacctgtagcgttcgtcagagctctgcgcagaatcgcaaatacaccatcaaagtcgaggtgcctaaaggcgcctggcgttcgtacttaaatatggaactaaccattccaattttcgccacgaattccgactgcgagcttattgttaaggcaatgcaaggtctcctaaaagatggaaacccgattccctcagcaatcgcagcaaactccggcatctacggtaccggcgcccccggctccgccggctccgccgccggctccggcgcgtgcccggtgccgctgcagctgccgccgctggaacgcctgaccctggatgataaaaaaccgctgaataccctgatctctgctactggtctgtggatgagtcgtaccggaaccattcataaaatcaaacaccacgaggttagccgttcgaaaatctatattgagatggcgtgtggcgatcatctggttgtgaacaatagccgctcttctcgtacagcacgtgcactgcgtcaccacaaatatcgtaaaacctgtaaacgttgccgtgtgtccgatgaggatctgaacaaattcctgacaaaagccaatgaggaccaaacaagcgtgaaagtgaaagtcgttagcgctcctacccgtactaaaaaagcaatgccgaaatccgttgctcgtgcccctaaaccactggaaaacactgaagcagcacaggcacagccgtctggaagcaaattctctccggccattcctgtttctacccaggagtccgtttctgttccagcaagtgtgagcaccagcattagcagtattagcaccggtgccaccgctagcgccctggttaaaggcaataccaatccgattacaagcatgtctgccccggttcaagcatcagctccagcactgacaaaatcccaaaccgatcgtctggaggttctgctgaatccgaaagacgaaatcagcctgaattccggcaaaccgtttcgtgaactggagagcgaactgctgtcacgtcgtaaaaaagacctgcaacaaatctatgccgaagaacgtgagaactatctggggaaactggaacgtgaaatcacccgctttttcgtggatcgtggctttctggagatcaaatccccgattctgattcctctggagtatatcgagcgtatgggcatcgacaatgataccgaactgagcaaacaaattttccgtgtggataaaaacttctgtctgcgccctatgctagcaccaaatctggctaactatctgcgcaaactggaccgtgccctgcctgatcctatcaaaatcttcgagatcggcccgtgttatcgtaaagagtccgacggtaaagaacatctggaggagtttaccatgctgaacttttgccaaatgggttcaggttgtactcgtgagaacctggaaagcatcatcaccgattttctgaaccacctgggcattgacttcaaaattgtgggcgacagctgtatggtgtttggcgacaccctggatgtcatgcacggcgacctggaactgtctagtgccgttgtgggcccaatcccgctggatcgtgagtggggtatcgacaaaccttggatcggtgcgggttttggtctggagcgtctgctgaaagtaaaacacgacttcaagaacatcaaacgtgctgcacgttccgagtcctattacaatggtatttctactaacctgtaa

SEQ ID NO: 170 - protein, 1824 aa, Artificial Sequence
  Description of Artificial Sequence: Synthetic polypeptide
  SPD5-MCP-PylRS AF
MEDNSVLNEDSNLEHVEGQPRRSMSQPVLNVEGDKRTSSTSATQQQVLSGAFSSADVRSIPIIQTWEENKALKTKITILRGELQMYQRRYSEAKEASQKRVKEVMDDYVDLKLGQENVQEKMEQYKLMEEDLLAMQSRIETSEDNFARQMKEFEAQKHAMEERIKELELSATDANNTTVGSFRGTLDDILKKNDPDFTLTSGYEERKINDLEAKLLSEIDKVAELEDHIQQLRQELDDQSARLADSENVRAQLEAATGQGILGAAGNAMVPNSTFMIGNGRESQTRDQLNYIDDLETKLADAKKENDKARQALVEYMNKCSKLEHEIRTMVKNSTFDSSSMLLGGQTSDELKIQIGKVNGELNVLRAENRELRIRCDQLTGGDGNLSISLGQSRLMAGIATNDVDSIGQGNETGGTSMRILPRESQLDDLEESKLPLMDTSSAVRNQQQFASMWEDFESVKDSLQNNHNDTLEGSFNSSMPPPGRDATQSFLSQKSFKNSPIVMQKPKSLHLHLKSHQSEGAGEQIQNNSFSTKTASPHVSQSHIPILHDMQQILDSSAMFLEGQHDVAVNVEQMQEKMSQIREALARLFERLKSSAALFEEILERMGSSDPNADKIKKMKLAFETSINDKLNVSAILEAAEKDLHNMSLNFSILEKSIVSQAAEASRRFTIAPDAEDVASSSLLNASYSPLFKFTSNSDIVEKLQNEVSELKNELEMARTRDMRSPLNGSSGRLSDVQINTNRMFEDLEVSEATLQKAKEENSTLKSQFAELEANLHQVNSKLGEVRCELNEALARVDGEQETRVKAENALEEARQLISSLKHEENELKKTITDMGMRLNEAKKSDEFLKSELSTALEEEKKSQNLADELSEELNGWRMRTKEAENKVEHASSEKSEMLERIVHLETEMEKLSTSEIAADYCSTKMTERKKEIELAKYREDFENAAIVGLERISKEISELTKKTLKAKIIPSNISSIQLVCDELCRRLSREREQQHEYAKVMRDVNEKIEKLQLEKDALEHELKMMSSNNENVPPVGTSVSGMPTKTSNQKCAQPHYTSPTRQLLHESTMAVDAIVQKLKKTHNMSGMGPELKETIGNVINESRVLRDFLHQKLILFKGIDMSNWKNETVDQLITDLGQLHQDNLMLEEQIKKYKKELKLTKSAIPTLGVEFQDRIKTEIGKIATDMGGAVKEIRKKGTEQKLISEEDLGAPGSAGSAAGSGASNFTQFVLVDNGGTGDVTVAPSNFANGIAEWISSNSRSQAYKVTCSVRQSSAQNRKYTIKVEVPKGAWRSYLNMELTIPIFATNSDCELIVKAMQGLLKDGNPIPSAIAANSGIYGTGAPGSAGSAAGSGACPVPLQLPPLERLTLDDKKPLNTLISATGLWMSRTGTIHKIKHHEVSRSKIYIEMACGDHLVVNNSRSSRTARALRHHKYRKTCKRCRVSDEDLNKFLTKANEDQTSVKVKVVSAPTRTKKAMPKSVARAPKPLENTEAAQAQPSGSKFSPAIPVSTQESVSVPASVSTSISSISTGATASALVKGNTNPITSMSAPVQASAPALTKSQTDRLEVLLNPKDEISLNSGKPFRELESELLSRRKKDLQQIYAEERENYLGKLEREITRFFVDRGFLEIKSPILIPLEYIERMGIDNDTELSKQIFRVDKNFCLRPMLAPNLANYLRKLDRALPDPIKIFEIGPCYRKESDGKEHLEEFTMLNFCQMGSGCTRENLESIITDFLNHLGIDFKIVGDSCMVFGDTLDVMHGDLELSSAVVGPIPLDREWGIDKPWIGAGFGLERLLKVKHDFKNIKRAARSESYYNGISTNL

SEQ ID NO: 171 - DNA, 819 bp, Artificial Sequence
  Description of Artificial Sequence: Synthetic polynucleotide
  GFP 39TAG (GFP with Amber-encoded amino acid position 39)
atgggccgcctggaaagcaccccgccgaaaaaaaaacgcaaagtggaagatagcgcgagcgattacaaagatgatgatgataaagtgagcaagggcgaggagctgttcaccggggtggtgcccatcctggtcgagctggacggcgacgtaaacggccacaagttcagcgtgtccggcgagggcgagggcgatgccacctagggcaagctgaccctgaagttcatctgcaccaccggcaagctgcccgtgccctggcccaccctcgtgaccaccctgacctacggcgtgcagtgcttcagccgctaccccgaccacatgaagcagcacgacttcttcaagtccgccatgcccgaaggctacgtccaggagcgcaccatcttcttcaaggacgacggcaactacaagacccgcgccgaggtgaagttcgagggcgacaccctggtgaaccgcatcgagctgaagggcatcgacttcaaggaggacggcaacatcctggggcacaagctggagtacaactacaacagccacaacgtctatatcatggccgacaagcagaagaacggcatcaaggccaacttcaagatccgccacaacatcgaggacggcagcgtgcagctcgccgaccactaccagcagaacacccccatcggcgacggccccgtgctgctgcccgacaaccactacctgagcacccagtccgccctgagcaaagaccccaacgagaagcgcgatcacatggtcctgctggagttcgtgaccgccgccgggatcactctcggcatggacgagctgtacaagcatcaccatcaccatcactaa

SEQ ID NO: 172 - protein, 272 aa, Artificial Sequence
  Description of Artificial Sequence: Synthetic polypeptide
  GFP 39TAG (GFP with Amber-encoded amino acid position 39)
  MOD_RES (67)..(67): Any non-canonical amino acid
MGRLESTPPKKKRKVEDSASDYKDDDDKVSKGEELFTGVVPILVELDGDVNGHKFSVSGEGEGDATXGKLTLKFICTTGKLPVPWPTLVTTLTYGVQCFSRYPDHMKQHDFFKSAMPEGYVQERTIFFKDDGNYKTRAEVKFEGDTLVNRIELKGIDFKEDGNILGHKLEYNYNSHNVYIMADKQKNGIKANFKIRHNIEDGSVQLADHYQQNTPIGDGPVLLPDNHYLSTQSALSKDPNEKRDHMVLLEFVTAAGITLGMDELYKHHHHHH

SEQ ID NO: 173 - DNA, 906 bp, Artificial Sequence
  Description of Artificial Sequence: Synthetic polynucleotide
  GFP 39TAG-2xMS2 (GFP 39TAG with 2 MS2 stem-loops)
atgggccgcctggaaagcaccccgccgaaaaaaaaacgcaaagtggaagatagcgcgagcgattacaaagatgatgatgataaagtgagcaagggcgaggagctgttcaccggggtggtgcccatcctggtcgagctggacggcgacgtaaacggccacaagttcagcgtgtccggcgagggcgagggcgatgccacctagggcaagctgaccctgaagttcatctgcaccaccggcaagctgcccgtgccctggcccaccctcgtgaccaccctgacctacggcgtgcagtgcttcagccgctaccccgaccacatgaagcagcacgacttcttcaagtccgccatgcccgaaggctacgtccaggagcgcaccatcttcttcaaggacgacggcaactacaagacccgcgccgaggtgaagttcgagggcgacaccctggtgaaccgcatcgagctgaagggcatcgacttcaaggaggacggcaacatcctggggcacaagctggagtacaactacaacagccacaacgtctatatcatggccgacaagcagaagaacggcatcaaggccaacttcaagatccgccacaacatcgaggacggcagcgtgcagctcgccgaccactaccagcagaacacccccatcggcgacggccccgtgctgctgcccgacaaccactacctgagcacccagtccgccctgagcaaagaccccaacgagaagcgcgatcacatggtcctgctggagttcgtgaccgccgccgggatcactctcggcatggacgagctgtacaagcatcaccatcaccatcactaaggatcctaaggtacctaattgcctagaaaacatgaggatcacccatgtctgcaggtcgactctagaaaacatgaggatcacccatgt

SEQ ID NO: 174 - protein, 272 aa, Artificial Sequence; identical to SEQ ID NO: 172
  Description of Artificial Sequence: Synthetic polypeptide
  GFP 39TAG-2xMS2 (GFP 39TAG with 2 MS2 stem-loops)
  MOD_RES (67)..(67): Any non-canonical amino acid

SEQ ID NO: 175 - DNA, 711 bp, Artificial Sequence
  Description of Artificial Sequence: Synthetic polynucleotide
  mOrange
  CDS (1)..(711)
atggtgagcaagggcgaggagaataatatggccatcatcaaggagttcatgcgcttcaaggtgcgcatggagggcaccgtgaacggccacgagttcgagatcgagggcgagggcgagggccgcccctacgagggctttcagaccgctaagctgaaggtgaccaagggcggccccctgcccttcgcctgggacatcctgtcccctctcttcacctacggctccaaggcctacgtgaagcaccccgccgacatccccgactacttcaagctgtccttccccgagggcttcaagtgggagcgcgtgatgaactacgaggacggcggcgtggtgaccgtgacccaggactcctcactgcaggacggcgagttcatctacaaggtgaagatgcgcggcaccaacttcccctccgacggccccgtgatgcagaagaagaccatgggctgggaggcctcctccgagcggatgtaccccgaggacggcgccctgaagggcgagatcaggatgaggctgaagctgaaggacggcggccactacacctccgaggtcaagaccacctacaaggccaagaagtccgtgcagctgcccggcgcctacatcgtcggcatcaagctggacatcacctcccacaacgaggactacaccatcgtggaacagtacgaacgcgccgagggccgccactccaccggcggcatggacgagctgtacaagtaa

SEQ ID NO: 176 - protein, 236 aa, Artificial Sequence
  Description of Artificial Sequence: Synthetic polypeptide
  mOrange
MVSKGEENNMAIIKEFMRFKVRMEGTVNGHEFEIEGEGEGRPYEGFQTAKLKVTKGGPLPFAWDILSPLFTYGSKAYVKHPADIPDYFKLSFPEGFKWERVMNYEDGGVVTVTQDSSLQDGEFIYKVKMRGTNFPSDGPVMQKKTMGWEASSERMYPEDGALKGEIRMRLKLKDGGHYTSEVKTTYKAKKSVQLPGAYIVGIKLDITSHNEDYTIVEQYERAEGRHSTGGMDELYK

SEQ ID NO: 177 - DNA, 942 bp, Artificial Sequence
  Description of Artificial Sequence: Synthetic polynucleotide
  iRFP (near-infrared fluorescent protein)
  CDS (1)..(942)
gaaggatccgtcgccaggcagcctgacctcttgacctgcgacgatgagccgatccatatccccggtgccatccaaccgcatggactgctgctcgccctcgccgccgacatgacgatcgttgccggcagcgacaaccttcccgaactcaccggactggcgatcggcgccctgatcggccgctctgcggccgatgtcttcgactcggagacgcacaaccgtctgacgatcgccttggccgagcccggggcggccgtcggagcaccgatcactgtcggcttcacgatgcgaaaggacgcaggcttcatcggctcctggcatcgccatgatcagctcatcttcctcgagctcgagcctccccagcgggacgtcgccgagccgcaggcgttcttccgccgcaccaacagcgccatccgccgcctgcaggccgccgaaaccttggaaagcgcctgcgccgccgcggcgcaagaggtgcggaagattaccggcttcgatcgggtgatgatctatcgcttcgcctccgacttcagcggcgaagtgatcgcagaggatcggtgcgccgaggtcgagtcaaaactaggcctgcactatcctgcctcaaccgtgccggcgcaggcccgtcggctctataccatcaacccggtacggatcattcccgatatcaattatcggccggtgccggtcaccccagacctcaatccggtcaccgggcggccgattgatcttagcttcgccatcctgcgcagcgtctcgcccgtccatctggaattcatgcgcaacataggcatgcacggcacgatgtcgatctcgattttgcgcggcgagcgactgtggggattgatcgtttgccatcaccgaacgccgtactacgtcgatctcgatggccgccaagcctgcgagctagtcgcccaggttctggcctggcagatcggcgtgatggaagag

SEQ ID NO: 178 - protein, 314 aa, Artificial Sequence
  Description of Artificial Sequence: Synthetic polypeptide
  iRFP (near-infrared fluorescent protein)
EGSVARQPDLLTCDDEPIHIPGAIQPHGLLLALAADMTIVAGSDNLPELTGLAIGALIGRSAADVFDSETHNRLTIALAEPGAAVGAPITVGFTMRKDAGFIGSWHRHDQLIFLELEPPQRDVAEPQAFFRRTNSAIRRLQAAETLESACAAAAQEVRKITGFDRVMIYRFASDFSGEVIAEDRCAEVESKLGLHYPASTVPAQARRLYTINPVRIIPDINYRPVPVTPDLNPVTGRPIDLSFAILRSVSPVHLEFMRNIGMHGTMSISILRGERLWGLIVCHHRTPYYVDLDGRQACELVAQVLAWQIGVMEE

SEQ ID NO: 179 - DNA, 786 bp, Artificial Sequence
  Description of Artificial Sequence: Synthetic polynucleotide
  mCherry 185TAG (mCherry with Amber-encoded amino acid position 185)
atgggccgcctggaaagcaccccgccgaaaaaaaaacgcaaagtggaagatagcgcgagcgtgagcaagggcgaggaggataacatggccatcatcaaggagttcatgcgcttcaaggtgcacatggagggctccgtgaacggccacgagttcgagatcgagggcgagggcgagggccgcccctacgagggcacccagaccgccaagctgaaggtgaccaagggtggccccctgcccttcgcctgggacatcctgtcccctcagttcatgtacggctccaaggcctacgtgaagcaccccgccgacatccccgactacttgaagctgtccttccccgagggcttcaagtgggagcgcgtgatgaacttcgaggacggcggcgtggtgaccgtgacccaggactcctccctgcaggacggcgagttcatctacaaggtgaagctgcgcggcaccaacttcccctccgacggccccgtaatgcagaagaagacgatgggctgggaggcctcctccgagcggatgtaccccgaggacggcgccctgaagggcgagatcaagcagaggctgaagctgaaggacggcggccactacgacgctgaggtcaagaccacctacaaggccaagtagcccgtgcagctgcccggcgcctacaacgtcaacatcaagttggacatcacctcccacaacgaggactacaccatcgtggaacagtacgaacgcgccgagggccgccactccaccggcggcatggacgagctgtacaagcatcatcatcatcatcattaa

SEQ ID NO: 180 - protein, 261 aa, Artificial Sequence
  Description of Artificial Sequence: Synthetic polypeptide
  mCherry 185TAG (mCherry with Amber-encoded amino acid position 185)
  MOD_RES (209)..(209): Any non-canonical amino acid
MGRLESTPPKKKRKVEDSASVSKGEEDNMAIIKEFMRFKVHMEGSVNGHEFEIEGEGEGRPYEGTQTAKLKVTKGGPLPFAWDILSPQFMYGSKAYVKHPADIPDYLKLSFPEGFKWERVMNFEDGGVVTVTQDSSLQDGEFIYKVKLRGTNFPSDGPVMQKKTMGWEASSERMYPEDGALKGEIKQRLKLKDGGHYDAEVKTTYKAKXPVQLPGAYNVNIKLDITSHNEDYTIVEQYERAEGRHSTGGMDELYKHHHHHH

SEQ ID NO: 181 - DNA, 873 bp, Artificial Sequence
  Description of Artificial Sequence: Synthetic polynucleotide
  mCherry 185TAG-2xMS2(mCherry 185TAG with 2 MS2 RNA stem-loops)
atgggccgcctggaaagcaccccgccgaaaaaaaaacgcaaagtggaagatagcgcgagcgtgagcaagggcgaggaggataacatggccatcatcaaggagttcatgcgcttcaaggtgcacatggagggctccgtgaacggccacgagttcgagatcgagggcgagggcgagggccgcccctacgagggcacccagaccgccaagctgaaggtgaccaagggtggccccctgcccttcgcctgggacatcctgtcccctcagttcatgtacggctccaaggcctacgtgaagcaccccgccgacatccccgactacttgaagctgtccttccccgagggcttcaagtgggagcgcgtgatgaacttcgaggacggcggcgtggtgaccgtgacccaggactcctccctgcaggacggcgagttcatctacaaggtgaagctgcgcggcaccaacttcccctccgacggccccgtaatgcagaagaagacgatgggctgggaggcctcctccgagcggatgtaccccgaggacggcgccctgaagggcgagatcaagcagaggctgaagctgaaggacggcggccactacgacgctgaggtcaagaccacctacaaggccaagtagcccgtgcagctgcccggcgcctacaacgtcaacatcaagttggacatcacctcccacaacgaggactacaccatcgtggaacagtacgaacgcgccgagggccgccactccaccggcggcatggacgagctgtacaagcatcatcatcatcatcattaaagatcctaaggtacctaattgcctagaaaacatgaggatcacccatgtctgcaggtcgactctagaaaacatgaggatcacccatgt

SEQ ID NO: 182 - protein, 261 aa, Artificial Sequence; identical to SEQ ID NO: 180
  Description of Artificial Sequence: Synthetic polypeptide
  mCherry 185TAG-2xMS2(mCherry 185TAG with 2 MS2 RNA stem-loops)
  MOD_RES (209)..(209): Any non-canonical amino acid

SEQ ID NO: 183 - DNA, 875 bp, Artificial Sequence
  Description of Artificial Sequence: Synthetic polynucleotide
  mCherry 185TAG-4xBoxB (mCherry 185TAG with 4 BoxB-loops)
atgggccgcctggaaagcaccccgccgaaaaaaaaacgcaaagtggaagatagcgcgagcgtgagcaagggcgaggaggataacatggccatcatcaaggagttcatgcgcttcaaggtgcacatggagggctccgtgaacggccacgagttcgagatcgagggcgagggcgagggccgcccctacgagggcacccagaccgccaagctgaaggtgaccaagggtggccccctgcccttcgcctgggacatcctgtcccctcagttcatgtacggctccaaggcctacgtgaagcaccccgccgacatccccgactacttgaagctgtccttccccgagggcttcaagtgggagcgcgtgatgaacttcgaggacggcggcgtggtgaccgtgacccaggactcctccctgcaggacggcgagttcatctacaaggtgaagctgcgcggcaccaacttcccctccgacggccccgtaatgcagaagaagacgatgggctgggaggcctcctccgagcggatgtaccccgaggacggcgccctgaagggcgagatcaagcagaggctgaagctgaaggacggcggccactacgacgctgaggtcaagaccacctacaaggccaagtagcccgtgcagctgcccggcgcctacaacgtcaacatcaagttggacatcacctcccacaacgaggactacaccatcgtggaacagtacgaacgcgccgagggccgccactccaccggcggcatggacgagctgtacaagcatcatcatcatcatcattaaagatcctaaggtaccgccctgaaaaagggctcgagccctgaaaaagggcaattgccctgaaaaagggcgtcgacgccctgaaaaagggc

SEQ ID NO: 184 - protein, 261 aa, Artificial Sequence; identical to SEQ ID NO: 180
  Description of Artificial Sequence: Synthetic polypeptide
  mCherry 185TAG-4xBoxB (mCherry 185TAG with 4 BoxB-loops)
  MOD_RES (209)..(209): Any non-canonical amino acid

SEQ ID NO: 185 - DNA, 906 bp, Artificial Sequence
  Description of Artificial Sequence: Synthetic polynucleotide
  GFP 39TAA-2xMS2 (GFP with Ochre-encoded amino acid position 39 and 2 MS2 RNA stem-loops)
atgggccgcctggaaagcaccccgccgaaaaaaaaacgcaaagtggaagatagcgcgagcgattacaaagatgatgatgataaagtgagcaagggcgaggagctgttcaccggggtggtgcccatcctggtcgagctggacggcgacgtaaacggccacaagttcagcgtgtccggcgagggcgagggcgatgccacctaaggcaagctgaccctgaagttcatctgcaccaccggcaagctgcccgtgccctggcccaccctcgtgaccaccctgacctacggcgtgcagtgcttcagccgctaccccgaccacatgaagcagcacgacttcttcaagtccgccatgcccgaaggctacgtccaggagcgcaccatcttcttcaaggacgacggcaactacaagacccgcgccgaggtgaagttcgagggcgacaccctggtgaaccgcatcgagctgaagggcatcgacttcaaggaggacggcaacatcctggggcacaagctggagtacaactacaacagccacaacgtctatatcatggccgacaagcagaagaacggcatcaaggccaacttcaagatccgccacaacatcgaggacggcagcgtgcagctcgccgaccactaccagcagaacacccccatcggcgacggccccgtgctgctgcccgacaaccactacctgagcacccagtccgccctgagcaaagaccccaacgagaagcgcgatcacatggtcctgctggagttcgtgaccgccgccgggatcactctcggcatggacgagctgtacaagcatcaccatcaccatcactgaggatcctaaggtacctaattgcctagaaaacatgaggatcacccatgtctgcaggtcgactctagaaaacatgaggatcacccatgt

SEQ ID NO: 186 - protein, 272 aa, Artificial Sequence; identical to SEQ ID NO: 172
  Description of Artificial Sequence: Synthetic polypeptide
  GFP 39TAA-2xMS2 (GFP with Ochre-encoded amino acid position 39 and 2 MS2 RNA stem-loops)
  MOD_RES (67)..(67): Any non-canonical amino acid

SEQ ID NO: 187 - DNA, 873 bp, Artificial Sequence
  Description of Artificial Sequence: Synthetic polynucleotide
  mCherry 185TAA-2xMS2 (mCherry with Ochre-encoded amino acid position 185 and 2 MS2 RNA stem-loops)
atgggccgcctggaaagcaccccgccgaaaaaaaaacgcaaagtggaagatagcgcgagcgtgagcaagggcgaggaggataacatggccatcatcaaggagttcatgcgcttcaaggtgcacatggagggctccgtgaacggccacgagttcgagatcgagggcgagggcgagggccgcccctacgagggcacccagaccgccaagctgaaggtgaccaagggtggccccctgcccttcgcctgggacatcctgtcccctcagttcatgtacggctccaaggcctacgtgaagcaccccgccgacatccccgactacttgaagctgtccttccccgagggcttcaagtgggagcgcgtgatgaacttcgaggacggcggcgtggtgaccgtgacccaggactcctccctgcaggacggcgagttcatctacaaggtgaagctgcgcggcaccaacttcccctccgacggccccgtaatgcagaagaagacgatgggctgggaggcctcctccgagcggatgtaccccgaggacggcgccctgaagggcgagatcaagcagaggctgaagctgaaggacggcggccactacgacgctgaggtcaagaccacctacaaggccaagtaacccgtgcagctgcccggcgcctacaacgtcaacatcaagttggacatcacctcccacaacgaggactacaccatcgtggaacagtacgaacgcgccgagggccgccactccaccggcggcatggacgagctgtacaagcatcatcatcatcatcattgaagatcctaaggtacctaattgcctagaaaacatgaggatcacccatgtctgcaggtcgactctagaaaacatgaggatcacccatgt

SEQ ID NO: 188 - protein, 261 aa, Artificial Sequence; identical to SEQ ID NO: 180
  Description of Artificial Sequence: Synthetic polypeptide
  mCherry 185TAA-2xMS2 (mCherry with Ochre-encoded amino acid position 185 and 2 MS2 RNA stem-loops)
  MOD_RES (209)..(209): Any non-canonical amino acid

SEQ ID NO: 189 - DNA, 906 bp, Artificial Sequence
  Description of Artificial Sequence: Synthetic polynucleotide
  GFP 39TGA-2xMS2 (GFP with Opal-encoded amino acid position 39 and 2 MS2 RNA stem-loops)
atgggccgcctggaaagcaccccgccgaaaaaaaaacgcaaagtggaagatagcgcgagcgattacaaagatgatgatgataaagtgagcaagggcgaggagctgttcaccggggtggtgcccatcctggtcgagctggacggcgacgtaaacggccacaagttcagcgtgtccggcgagggcgagggcgatgccacctgaggcaagctgaccctgaagttcatctgcaccaccggcaagctgcccgtgccctggcccaccctcgtgaccaccctgacctacggcgtgcagtgcttcagccgctaccccgaccacatgaagcagcacgacttcttcaagtccgccatgcccgaaggctacgtccaggagcgcaccatcttcttcaaggacgacggcaactacaagacccgcgccgaggtgaagttcgagggcgacaccctggtgaaccgcatcgagctgaagggcatcgacttcaaggaggacggcaacatcctggggcacaagctggagtacaactacaacagccacaacgtctatatcatggccgacaagcagaagaacggcatcaaggccaacttcaagatccgccacaacatcgaggacggcagcgtgcagctcgccgaccactaccagcagaacacccccatcggcgacggccccgtgctgctgcccgacaaccactacctgagcacccagtccgccctgagcaaagaccccaacgagaagcgcgatcacatggtcctgctggagttcgtgaccgccgccgggatcactctcggcatggacgagctgtacaagcatcaccatcaccatcactaaggatcctaaggtacctaattgcctagaaaacatgaggatcacccatgtctgcaggtcgactctagaaaacatgaggatcacccatgt

SEQ ID NO: 190 - protein, 272 aa, Artificial Sequence; identical to SEQ ID NO: 172
  Description of Artificial Sequence: Synthetic polypeptide
  GFP 39TGA-2xMS2 (GFP with Opal-encoded amino acid position 39 and 2 MS2 RNA stem-loops)
  MOD_RES (67)..(67): Any non-canonical amino acid

SEQ ID NO: 191 - DNA, 873 bp, Artificial Sequence
  Description of Artificial Sequence: Synthetic polynucleotide
  mCherry 185TGA-2xMS2 (mCherry with Opal-encoded amino acid position 185 and 2 MS2 RNA stem-loops)
atgggccgcctggaaagcaccccgccgaaaaaaaaacgcaaagtggaagatagcgcgagcgtgagcaagggcgaggaggataacatggccatcatcaaggagttcatgcgcttcaaggtgcacatggagggctccgtgaacggccacgagttcgagatcgagggcgagggcgagggccgcccctacgagggcacccagaccgccaagctgaaggtgaccaagggtggccccctgcccttcgcctgggacatcctgtcccctcagttcatgtacggctccaaggcctacgtgaagcaccccgccgacatccccgactacttgaagctgtccttccccgagggcttcaagtgggagcgcgtgatgaacttcgaggacggcggcgtggtgaccgtgacccaggactcctccctgcaggacggcgagttcatctacaaggtgaagctgcgcggcaccaacttcccctccgacggccccgtaatgcagaagaagacgatgggctgggaggcctcctccgagcggatgtaccccgaggacggcgccctgaagggcgagatcaagcagaggctgaagctgaaggacggcggccactacgacgctgaggtcaagaccacctacaaggccaagtgacccgtgcagctgcccggcgcctacaacgtcaacatcaagttggacatcacctcccacaacgaggactacaccatcgtggaacagtacgaacgcgccgagggccgccactccaccggcggcatggacgagctgtacaagcatcatcatcatcatcattaaagatcctaaggtacctaattgcctagaaaacatgaggatcacccatgtctgcaggtcgactctagaaaacatgaggatcacccatgt

SEQ ID NO: 192 - protein, 261 aa, Artificial Sequence; identical to SEQ ID NO: 180
  Description of Artificial Sequence: Synthetic polypeptide
  mCherry 185TGA-2xMS2 (mCherry with Opal-encoded amino acid position 185 and 2 MS2 RNA stem-loops)
  MOD_RES (209)..(209): Any non-canonical amino acid

SEQ ID NO: 193 - DNA, 4425 bp, Homo sapiens
  Nup153 (Homo sapiens Nucleoporin 153; Uniprot: P49790)
  CDS (1)..(4425)
atggcgtctggtgctggcggtgttggtggaggaggtgggggtaaaattcgtactcgtcgctgtcatcaaggtccgattaaaccgtatcagcagggacgtcagcaacatcagggtattctgagccgtgtgaccgaaagcgtgaaaaacattgtgccgggttggctgcaacgttatttcaacaaaaatgaggatgtgtgttcgtgttctaccgataccagtgaagttcctcgttggccggaaaacaaagaagatcacctggtgtatgccgatgaagaatcgagcaatatcaccgatggccgtattactcctgaaccggcggttagtaacactgaagaaccgtcaaccacaagcacagcatcgaactatccagatgtcctgactcgcccttctctgcaccgttctcacctgaactttagcatgctggaatcaccagctctgcattgtcagccgtctaccagtagtgccttcccgattggctctagtggcttttcgctggtcaaagagatcaaagactcgacctctcaacatgacgatgataacattagcacgacctcgggttttagtagccgtgcctccgataaagacattaccgtgagcaaaaacacctctctgccgcctctgtggagtcctgaagccgaacgctctcatagtctgtctcagcacacagccaccagttccaaaaaaccagccttcaacctgagcgcctttggtacactgtcaccgagcctgggaaattcctctatcctgaaaacatcacagctgggcgatagtccgttttatccgggcaaaacgacgtatggtggtgccgctgctgctgttcgccagtctaaactgcgtaacactccgtatcaagctccagtccgtcgccaaatgaaagcaaaacaactgtcggcccagtcttatggtgtgacaagctctacagctcgtcgtatcctgcaaagtctggagaaaatgtcatctccgctggcagatgccaaacgtattccgtccattgtgagcagtccgctgaatagcccgctggaccgtagtgggatcgatatcaccgacttccaagccaaacgtgagaaagtggatagccagtatccgcctgtacaacgtctgatgaccccgaaaccggtttcaattgccacgaatcgtagcgtgtatttcaaaccgtcactgacccctagtggtgagtttcgtaaaacaaatcagcgtatcgacaacaaatgctctaccgggtatgaaaaaaacatgacgccgggacagaatcgtgaacaacgtgaatctggcttctcttatccgaactttagtctgccggcagcaaatggtctgagtagcggtgtaggaggtggtgggggcaaaatgcgccgtgaacgtcacgcctttgtggcctctaaacctctggaagaagaagagatggaggttcctgtactgccgaaaatcagtctgcctatcacctcttcaagtctgccgaccttcaacttttctagtccggaaatcacaacctctagcccgtcaccgattaatagcagtcaagcactgacgaataaagtccaaatgacctcaccgagttctacgggttctccgatgttcaaattctctagtcctatcgtgaaatcaaccgaagcgaacgtcctgcctccttctagtattgggttcacctttagcgtcccagtggccaaaacagctgaactgagcggtagcagtagtactctggaaccgattatcagctcaagcgcccatcatgtcactaccgtgaatagcacaaactgtaaaaaaacgccgcctgaggactgtgaaggaccgtttcgtcctgccgaaatcctgaaagaaggttccgtcctggacattctgaaatctccgggatttgcctctcctaaaatcgactctgttgccgctcaaccaactgccacatcaccggtggtttatactcgtccggcgattagcagttttagcagtagtggcatcggttttggtgaatccctgaaagctggctcatcttggcagtgtgacacctgcctgctgcaaaacaaagtgaccgataacaaatgtattgcctgtcaggccgccaaactgtctcctcgtgatacagccaaacagaccggcatcgaaacccctaataaaagcgggaaaacgaccctgtcagcaagtggtacgggatttggggacaaattcaaacctgtgatcggcacatgggactgtgacacttgtctggtacagaacaaaccagaagcgatcaaatgtgtggcctgtgaaacgcctaaacctggaacatgtgtgaaacgtgccctgactctgactgttgtgtcagaaagcgccgaaaccatgacggcaagcagctcatcctgtactgtgactaccgggactctgggatttggtgacaaattcaaacgcccgattggttcctgggaatgctccgtgtgttgtgtgagcaataatgccgaggacaacaaatgtgtgtcctgtatgagcgagaaacctggcagctctgttcctgctagcagctctagcacagttcctgttagtctgcctagtggtggttctctgggtctggaaaaattcaaaaaacctgaaggaagctgggattgtgagctgtgcctggtacagaataaagcggatagcacgaaatgtctggcctgtgagtcagccaaaccagggactaaaagcggctttaaaggcttcgacacgtcgagcagttctagtaacagcgccgcctcatcatctttcaaatttggggtgagcagctcctctagtggtcctagtcaaacactgacctctaccggaaacttcaaattcggcgatcagggtggcttcaaaattggtgtctcctctgattcgggtagcattaacccgatgagtgaggggttcaaattcagcaaaccaattggcgatttcaaattcggtgtgtcgtctgaatccaaacctgaagaagtcaaaaaagacagcaaaaacgacaatttcaaattcggcctgtctagtggtctgtctaatccggttagcctgaccccgtttcagttcggggtgtctaatctgggtcaggaagagaaaaaagaggagctgcctaaaagttcatctgccgggttcagttttggtacaggcgtgatcaatagcactccagcaccagccaatacaatcgtgacgagcgagaacaaatcgagcttcaacctggggacaatcgaaacgaaaagcgccagtgtagcgccattcacgtgtaaaacctccgaggcaaaaaaagaagagatgccggccacaaaaggtggattctcattcggcaacgtggaaccggctagcctgccatcagcaagcgtgtttgtactgggccgtaccgaggagaaacagcaggaacctgttactagcaccagtctggtctttggtaaaaaagccgacaacgaagaaccgaaatgtcagccagtgttcagcttcggcaatagcgaacagacgaaagacgaaaacagcagcaaatcgacgttcagcttcagtatgacgaaaccgagcgaaaaagaaagtgagcagccagcaaaagcaacgttcgcctttggagcacagacatcaaccacagccgatcaaggagcagcgaaaccagttttcagttttctgaataacagctcaagcagcagttctacaccagcaacctcagcaggtggtgggatctttggatcaagcacctcatccagcaatccgccagtggcaacattcgtgtttggccagagcagtaatccggtgtcatcttcagcatttgggaataccgccgagagtagcacatcacagtctctgctgttctcacaggactctaaactggcaaccacctcttctactggtacagcggttaccccgtttgtgttcggtccgggagcatcatccaataataccacgacgtcgggctttgggtttggtgccacgacaacaagcagtagcgctggtagcagctttgtctttggcacaggtccttcagcaccttctgcttcaccagctttcggagccaatcagactccgacattcggacagtcacagggtgcctctcaaccaaatcctccgggttttggcagtattagcagtagtaccgccctgttcccgaccggtagtcaaccggcaccgccaacatttggaacggttagcagtagtagtcagcctccggtgtttggacaacaaccgagccagagcgccttcggatcaggaacgacccctaatagtagcagtgccttccagttcggtagcagtaccaccaacttcaacttcacgaacaatagcccgtcaggtgtgttcacgtttggcgccaattcttctaccccagcggcaagtgctcaaccttcaggctcaggtggatttcctttcaaccagtcaccagcagcgtttactgttggttctaacgggaaaaacgttttcagtagcagcggcacctcgttttctggtcgtaaaatcaaaacggccgttcgtcgccgtaaa

SEQ ID NO: 194 - protein, 1475 aa, Homo sapiens [sequence omitted]

SEQ ID NO: 195 - DNA, 1398 bp, Homo sapiens
  Vim 116TAG (Homo sapiens Vimentin with Amber-encoded amino acid position 116; Uniprot: P08670)
atgtccaccaggtccgtgtcctcgtcctcctaccgcaggatgttcggcggcccgggcaccgcgagccggccgagctccagccggagctacgtgactacgtccacccgcacctacagcctgggcagcgcgctgcgccccagcaccagccgcagcctctacgcctcgtccccgggcggcgtgtatgccacgcgctcctctgccgtgcgcctgcggagcagcgtgcccggggtgcggctcctgcaggactcggtggacttctcgctggccgacgccatcaacaccgagttcaagaacacccgcaccaacgagaaggtggagctgcaggagctgaatgaccgcttcgcctagtacatcgacaaggtgcgcttcctggagcagcagaataagatcctgctggccgagctcgagcagctcaagggccaaggcaagtcgcgcctgggggacctctacgaggaggagatgcgggagctgcgccggcaggtggaccagctaaccaacgacaaagcccgcgtcgaggtggagcgcgacaacctggccgaggacatcatgcgcctccgggagaaattgcaggaggagatgcttcagagagaggaagccgaaaacaccctgcaatctttcagacaggatgttgacaatgcgtctctggcacgtcttgaccttgaacgcaaagtggaatctttgcaagaagagattgcctttttgaagaaactccacgaagaggaaatccaggagctgcaggctcagattcaggaacagcatgtccaaatcgatgtggatgtttccaagcctgacctcacggctgccctgcgtgacgtacgtcagcaatatgaaagtgtggctgccaagaacctgcaggaggcagaagaatggtacaaatccaagtttgctgacctctctgaggctgccaaccggaacaatgacgccctgcgccaggcaaagcaggagtccactgagtaccggagacaggtgcagtccctcacctgtgaagtggatgcccttaaaggaaccaatgagtccctggaacgccagatgcgtgaaatggaagagaactttgccgttgaagctgctaactaccaagacactattggccgcctgcaggatgagattcagaatatgaaggaggaaatggctcgtcaccttcgtgaataccaagacctgctcaatgttaagatggcccttgacattgagattgccacctacaggaagctgctggaaggcgaggagagcaggatttctctgcctcttccaaacttttcctccctgaacctgagggaaactaatctggattcactccctctggttgatacccactcaaaaaggacacttctgattaagacggttgaaactagagatggacaggttatcaacgaaacttctcagcatcacgatgaccttgaa

SEQ ID NO: 196 - protein, 466 aa, Homo sapiens
  Vim 116TAG (Homo sapiens Vimentin with Amber-encoded amino acid position 116; Uniprot: P08670)
  MOD_RES (116)..(116): Any non-canonical amino acid
MSTRSVSSSSYRRMFGGPGTASRPSSSRSYVTTSTRTYSLGSALRPSTSRSLYASSPGGVYATRSSAVRLRSSVPGVRLLQDSVDFSLADAINTEFKNTRTNEKVELQELNDRFAXYIDKVRFLEQQNKILLAELEQLKGQGKSRLGDLYEEEMRELRRQVDQLTNDKARVEVERDNLAEDIMRLREKLQEEMLQREEAENTLQSFRQDVDNASLARLDLERKVESLQEEIAFLKKLHEEEIQELQAQIQEQHVQIDVDVSKPDLTAALRDVRQQYESVAAKNLQEAEEWYKSKFADLSEAANRNNDALRQAKQESTEYRRQVQSLTCEVDALKGTNESLERQMREMEENFAVEAANYQDTIGRLQDEIQNMKEEMARHLREYQDLLNVKMALDIEIATYRKLLEGEESRISLPLPNFSSLNLRETNLDSLPLVDTHSKRTLLIKTVETRDGQVINETSQHHDDLE

SEQ ID NO: 197 - DNA, 4111 bp, Homo sapiens
  INSR 676TAG (Homo sapiens insulin receptor; Uniprot: P06213)
atgggcaccgggggccggcggggggcggcggccgcgccgctgctggtggcggtggccgcgctgctactgggcgccgcgggccacctgtaccccggagaggtgtgtcccggcatggatatccggaacaacctcactaggttgcatgagctggagaattgctctgtcatcgaaggacacttgcagatactcttgatgttcaaaacgaggcccgaagatttccgagacctcagtttccccaaactcatcatgatcactgattacttgctgctcttccgggtctatgggctcgagagcctgaaggacctgttccccaacctcacggtcatccggggatcacgactgttctttaactacgcgctggtcatcttcgagatggttcacctcaaggaactcggcctctacaacctgatgaacatcacccggggttctgtccgcatcgagaagaacaatgagctctgttacttggccactatcgactggtcccgtatcctggattccgtggaggataattacatcgtgttgaacaaagatgacaacgaggagtgtggagacatctgtccgggtaccgcgaagggcaagaccaactgccccgccaccgtcatcaacgggcagtttgtcgaacgatgttggactcatagtcactgccagaaagtttgcccgaccatctgtaagtcacacggctgcaccgccgaaggcctctgttgccacagcgagtgcctgggcaactgttctcagcccgacgaccccaccaagtgcgtggcctgccgcaacttctacctggatggcaggtgtgtggagacctgcccgcccccgtactaccacttccaggactggcgctgtgtgaacttcagcttctgccaggacctgcaccacaaatgcaagaactcgcggaggcagggctgccaccagtacgtcattcacaacaacaagtgcatccctgagtgtccctccgggtacacgatgaattccagcaacttgctgtgcaccccatgcctgggtccctgtcccaaggtgtgccacctcctagaaggcgagaagaccatcgactcggtgacgtctgcccaggagctccgaggatgcaccgtcatcaacgggagtctgatcatcaacattcgaggaggcaacaatctggcagctgagctagaagccaacctcggcctcattgaagaaatttcagggtatctaaaaatccgccgatcctacgctctggtgtcactttccttcttccggaagttacgtctgattcgaggagagaccttggaaattgggaactactccttctatgccttggacaaccagaacctaaggcagctctgggactggagcaaacacaacctcaccatcactcaggggaaactcttcttccactataaccccaaactctgcttgtcagaaatccacaagatggaagaagtttcaggaaccaaggggcgccaggagagaaacgacattgccctgaagaccaatggggaccaggcatcctgtgaaaatgagttacttaaattttcttacattcggacatcttttgacaagatcttgctgagatgggagccgtactggccccccgacttccgagacctcttggggttcatgctgttctacaaagaggccccttatcagaatgtgacggagttcgacgggcaggatgcatgtggttccaacagttggacggtggtagacattgacccacccctgaggtccaacgaccccaaatcacagaaccacccagggtggctgatgcggggtctcaagccctggacccagtatgccatctttgtgaagaccctggtcaccttttcggatgaacgccggacctatggggccaagagtgacatcatttatgtccagacagatgccaccaacccctctgtgcccctggatccaatctcagtgtctaactcatcatcccagattattctgaagtggaaaccaccctccgaccccaatggcaacatcacccactacctggttttctgggagaggcaggcggaagacagtgagctgttcgagctggattattgcctctaggggctgaagctgccctcgaggacctggtctccaccattcgagtctgaagattctcagaagcacaaccagagtgagtatgaggattcggccggcgaatgctgctcctgtccaaagacagactctcagatcctgaaggagctggaggagtcctcgtttaggaagacgtttgaggattacctgcacaacgtggttttcgtccccaggccatctcggaaacgcaggtcccttggcgatgttgggaatgtgacggtggccgtgcccacggtggcagctttccccaacacttcctcgaccagcgtgcccacgagtccggaggagcacaggccttttgagaaggtggtgaacaaggagtcgctggtcatctccggcttgcgacacttcacgggctatcgcatcgagctgcaggcttgcaaccaggacacccctgaggaacggtgcagtgtggcagcctacgtcagtgcgaggaccatgcctgaagccaaggctgatgacattgttggccctgtgacgcatgaaatctttgagaacaacgtcgtccacttgatgtggcaggagccgaaggagcccaatggtctgatcgtgctgtatgaagtgagttatcggcgatatggtgatgaggagctgcatctctgcgtctcccgcaagcacttcgctctggaacggggctgcaggctgcgtgggctgtcaccggggaactacagcgtgcgaatccgggccacctcccttgcgggcaacggctcttggacggaacccacctatttctacgtgacagactatttagacgtcccgtcaaatattgcaaaaattatcatcggccccctcatctttgtctttctcttcagtgttgtgattggaagtatttatctattcctgagaaagaggcagccagatgggccgctgggaccgctttacgcttcttcaaaccctgagtatctcagtgccagtgatgtgtttccatgctctgtgtacgtgccggacgagtgggaggtgtctcgagagaagatcaccctccttcgagagctggggcagggctccttcggcatggtgtatgagggcaatgccagggacatcatcaagggtgaggcagagacccgcgtggcggtgaagacggtcaacgagtcagccagtctccgagagcggattgagttcctcaatgaggcctcggtcatgaagggcttcacctgccatcacgtggtgcgcctcctgggagtggtgtccaagggccagcccacgctggtggtgatggagctgatggctcacggagacctgaagagctacctccgttctctgcggccagaggctgagaataatcctggccgccctccccctacccttcaagagatgattcagatggcggcagagattgctgacgggatggcctacctgaacgccaagaagtttgtgcatcgggacctggcagcgagaaactgcatggtcgcccatgattttactgtcaaaattggagactttggaatgaccagagacatctatgaaacggattactaccggaaagggggcaagggtctgctccctgtacggtggatggcaccggagtccctgaaggatggggtcttcaccacttcttctgacatgtggtcctttggcgtggtcctttgggaaatcaccagcttggcagaacagccttaccaaggcctgtctaatgaacaggtgttgaaatttgtcatggatggagggtatctggatcaacccgacaactgtccagagagagtcactgacctcatgcgcatgtgctggcaattcaaccccaacatgaggccaaccttcctggagattgtcaacctgctcaaggacgacctgcaccccagctttccagaggtgtcgttcttccacagcgaggagaacaaggctcccgagagtgaggagctggagatggagtttgaggacatggagaatgtgcccctggaccgttcctcgcactgtcagagggaggaggcggggggccgggatggagggtcctcgctgggtttcaagcggagctacgaggaacacatcccttacacacacatgaacggaggcaagaaaaacgggcggattctgaccttgcctcggtccaatccttcct

SEQ ID NO: 198 - protein, 1370 aa, Homo sapiens
  INSR 676TAG (Homo sapiens insulin receptor; Uniprot: P06213)
  MOD_RES (676)..(676): Any non-canonical amino acid
MGTGGRRGAAAAPLLVAVAALLLGAAGHLYPGEVCPGMDIRNNLTRLHELENCSVIEGHLQILLMFKTRPEDFRDLSFPKLIMITDYLLLFRVYGLESLKDLFPNLTVIRGSRLFFNYALVIFEMVHLKELGLYNLMNITRGSVRIEKNNELCYLATIDWSRILDSVEDNYIVLNKDDNEECGDICPGTAKGKTNCPATVINGQFVERCWTHSHCQKVCPTICKSHGCTAEGLCCHSECLGNCSQPDDPTKCVACRNFYLDGRCVETCPPPYYHFQDWRCVNFSFCQDLHHKCKNSRRQGCHQYVIHNNKCIPECPSGYTMNSSNLLCTPCLGPCPKVCHLLEGEKTIDSVTSAQELRGCTVINGSLIINIRGGNNLAAELEANLGLIEEISGYLKIRRSYALVSLSFFRKLRLIRGETLEIGNYSFYALDNQNLRQLWDWSKHNLTITQGKLFFHYNPKLCLSEIHKMEEVSGTKGRQERNDIALKTNGDQASCENELLKFSYIRTSFDKILLRWEPYWPPDFRDLLGFMLFYKEAPYQNVTEFDGQDACGSNSWTVVDIDPPLRSNDPKSQNHPGWLMRGLKPWTQYAIFVKTLVTFSDERRTYGAKSDIIYVQTDATNPSVPLDPISVSNSSSQIILKWKPPSDPNGNITHYLVFWERQAEDSELFELDYCLXGLKLPSRTWSPPFESEDSQKHNQSEYEDSAGECCSCPKTDSQILKELEESSFRKTFEDYLHNVVFVPRPSRKRRSLGDVGNVTVAVPTVAAFPNTSSTSVPTSPEEHRPFEKVVNKESLVISGLRHFTGYRIELQACNQDTPEERCSVAAYVSARTMPEAKADDIVGPVTHEIFENNVVHLMWQEPKEPNGLIVLYEVSYRRYGDEELHLCVSRKHFALERGCRLRGLSPGNYSVRIRATSLAGNGSWTEPTYFYVTDYLDVPSNIAKIIIGPLIFVFLFSVVIGSIYLFLRKRQPDGPLGPLYASSNPEYLSASDVFPCSVYVPDEWEVSREKITLLRELGQGSFGMVYEGNARDIIKGEAETRVAVKTVNESASLRERIEFLNEASVMKGFTCHHVVRLLGVVSKGQPTLVVMELMAHGDLKSYLRSLRPEAENNPGRPPPTLQEMIQMAAEIADGMAYLNAKKFVHRDLAARNCMVAHDFTVKIGDFGMTRDIYETDYYRKGGKGLLPVRWMAPESLKDGVFTTSSDMWSFGVVLWEITSLAEQPYQGLSNEQVLKFVMDGGYLDQPDNCPERVTDLMRMCWQFNPNMRPTFLEIVNLLKDDLHPSFPEVSFFHSEENKAPESEELEMEFEDMENVPLDRSSHCQREEAGGRDGGSSLGFKRSYEEHIPYTHMNGGKKNGRILTLPRSNPS

SEQ ID NO: 199 - DNA, 5166 bp, Artificial Sequence
  Description of Artificial Sequence: Synthetic polynucleotide
  Nup153-EGFP 149TAG
atggcgtctggtgctggcggtgttggtggaggaggtgggggtaaaattcgtactcgtcgctgtcatcaaggtccgattaaaccgtatcagcagggacgtcagcaacatcagggtattctgagccgtgtgaccgaaagcgtgaaaaacattgtgccgggttggctgcaacgttatttcaacaaaaatgaggatgtgtgttcgtgttctaccgataccagtgaagttcctcgttggccggaaaacaaagaagatcacctggtgtatgccgatgaagaatcgagcaatatcaccgatggccgtattactcctgaaccggcggttagtaacactgaagaaccgtcaaccacaagcacagcatcgaactatccagatgtcctgactcgcccttctctgcaccgttctcacctgaactttagcatgctggaatcaccagctctgcattgtcagccgtctaccagtagtgccttcccgattggctctagtggcttttcgctggtcaaagagatcaaagactcgacctctcaacatgacgatgataacattagcacgacctcgggttttagtagccgtgcctccgataaagacattaccgtgagcaaaaacacctctctgccgcctctgtggagtcctgaagccgaacgctctcatagtctgtctcagcacacagccaccagttccaaaaaaccagccttcaacctgagcgcctttggtacactgtcaccgagcctgggaaattcctctatcctgaaaacatcacagctgggcgatagtccgttttatccgggcaaaacgacgtatggtggtgccgctgctgctgttcgccagtctaaactgcgtaacactccgtatcaagctccagtccgtcgccaaatgaaagcaaaacaactgtcggcccagtcttatggtgtgacaagctctacagctcgtcgtatcctgcaaagtctggagaaaatgtcatctccgctggcagatgccaaacgtattccgtccattgtgagcagtccgctgaatagcccgctggaccgtagtgggatcgatatcaccgacttccaagccaaacgtgagaaagtggatagccagtatccgcctgtacaacgtctgatgaccccgaaaccggtttcaattgccacgaatcgtagcgtgtatttcaaaccgtcactgacccctagtggtgagtttcgtaaaacaaatcagcgtatcgacaacaaatgctctaccgggtatgaaaaaaacatgacgccgggacagaatcgtgaacaacgtgaatctggcttctcttatccgaactttagtctgccggcagcaaatggtctgagtagcggtgtaggaggtggtgggggcaaaatgcgccgtgaacgtcacgcctttgtggcctctaaacctctggaagaagaagagatggaggttcctgtactgccgaaaatcagtctgcctatcacctcttcaagtctgccgaccttcaacttttctagtccggaaatcacaacctctagcccgtcaccgattaatagcagtcaagcactgacgaataaagtccaaatgacctcaccgagttctacgggttctccgatgttcaaattctctagtcctatcgtgaaatcaaccgaagcgaacgtcctgcctccttctagtattgggttcacctttagcgtcccagtggccaaaacagctgaactgagcggtagcagtagtactctggaaccgattatcagctcaagcgcccatcatgtcactaccgtgaatagcacaaactgtaaaaaaacgccgcctgaggactgtgaaggaccgtttcgtcctgccgaaatcctgaaagaaggttccgtcctggacattctgaaatctccgggatttgcctctcctaaaatcgactctgttgccgctcaaccaactgccacatcaccggtggtttatactcgtccggcgattagcagttttagcagtagtggcatcggttttggtgaatccctgaaagctggctcatcttggcagtgtgacacctgcctgctgcaaaacaaagtgaccgataacaaatgtattgcctgtcaggccgccaaactgtctcctcgtgatacagccaaacagaccggcatcgaaacccctaataaaagcgggaaaacgaccctgtcagcaagtggtacgggatttggggacaaattcaaacctgtgatcggcacatgggactgtgacacttgtctggtacagaacaaaccagaagcgatcaaatgtgtggcctgtgaaacgcctaaacctggaacatgtgtgaaacgtgccctgactctgactgttgtgtcagaaagcgccgaaaccatgacggcaagcagctcatcctgtactgtgactaccgggactctgggatttggtgacaaattcaaacgcccgattggttcctgggaatgctccgtgtgttgtgtgagcaataatgccgaggacaacaaatgtgtgtcctgtatgagcgagaaacctggcagctctgttcctgctagcagctctagcacagttcctgttagtctgcctagtggtggttctctgggtctggaaaaattcaaaaaacctgaaggaagctgggattgtgagctgtgcctggtacagaataaagcggatagcacgaaatgtctggcctgtgagtcagccaaaccagggactaaaagcggctttaaaggcttcgacacgtcgagcagttctagtaacagcgccgcctcatcatctttcaaatttggggtgagcagctcctctagtggtcctagtcaaacactgacctctaccggaaacttcaaattcggcgatcagggtggcttcaaaattggtgtctcctctgattcgggtagcattaacccgatgagtgaggggttcaaattcagcaaaccaattggcgatttcaaattcggtgtgtcgtctgaatccaaacctgaagaagtcaaaaaagacagcaaaaacgacaatttcaaattcggcctgtctagtggtctgtctaatccggttagcctgaccccgtttcagttcggggtgtctaatctgggtcaggaagagaaaaaagaggagctgcctaaaagttcatctgccgggttcagttttggtacaggcgtgatcaatagcactccagcaccagccaatacaatcgtgacgagcgagaacaaatcgagcttcaacctggggacaatcgaaacgaaaagcgccagtgtagcgccattcacgtgtaaaacctccgaggcaaaaaaagaagagatgccggccacaaaaggtggattctcattcggcaacgtggaaccggctagcctgccatcagcaagcgtgtttgtactgggccgtaccgaggagaaacagcaggaacctgttactagcaccagtctggtctttggtaaaaaagccgacaacgaagaaccgaaatgtcagccagtgttcagcttcggcaatagcgaacagacgaaagacgaaaacagcagcaaatcgacgttcagcttcagtatgacgaaaccgagcgaaaaagaaagtgagcagccagcaaaagcaacgttcgcctttggagcacagacatcaaccacagccgatcaaggagcagcgaaaccagttttcagttttctgaataacagctcaagcagcagttctacaccagcaacctcagcaggtggtgggatctttggatcaagcacctcatccagcaatccgccagtggcaacattcgtgtttggccagagcagtaatccggtgtcatcttcagcatttgggaataccgccgagagtagcacatcacagtctctgctgttctcacaggactctaaactggcaaccacctcttctactggtacagcggttaccccgtttgtgttcggtccgggagcatcatccaataataccacgacgtcgggctttgggtttggtgccacgacaacaagcagtagcgctggtagcagctttgtctttggcacaggtccttcagcaccttctgcttcaccagctttcggagccaatcagactccgacattcggacagtcacagggtgcctctcaaccaaatcctccgggttttggcagtattagcagtagtaccgccctgttcccgaccggtagtcaaccggcaccgccaacatttggaacggttagcagtagtagtcagcctccggtgtttggacaacaaccgagccagagcgccttcggatcaggaacgacccctaatagtagcagtgccttccagttcggtagcagtaccaccaacttcaacttcacgaacaatagcccgtcaggtgtgttcacgtttggcgccaattcttctaccccagcggcaagtgctcaaccttcaggctcaggtggatttcctttcaaccagtcaccagcagcgtttactgttggttctaacgggaaaaacgttttcagtagcagcggcacctcgttttctggtcgtaaaatcaaaacggccgttcgtcgccgtaaagcggatccaccggtcgccacgagagtgagcaagggcgaggagctgttcaccggggtggtgcccatcctggtcgagctggacggcgacgtaaacggccacaagttcagcgtgtccggcgagggcgagggcgatgccacctacggcaagctgaccctgaagttcatctgcaccaccggcaagctgcccgtgccctggcccaccctcgtgaccaccctgacctacggcgtgcagtgcttcagccgctaccccgaccacatgaagcagcacgacttcttcaagtccgccatgcccgaaggctacgtccaggagcgcaccatcttcttcaaggacgacggcaactacaagacccgcgccgaggtgaagttcgagggcgacaccctggtgaaccgcatcgagctgaagggcatcgacttcaaggaggacggcaacatcctggggcacaagctggagtacaactacaacagccactaggtctatatcatggccgacaagcagaagaacggcatcaaggtgaacttcaagatccgccacaacatcgaggacggcagcgtgcagctcgccgaccactaccagcagaacacccccatcggcgacggccccgtgctgctgcccgacaaccactacctgagcacccagtccgccctgagcaaagaccccaacgagaagcgcgatcacatggtcctgctggagttcgtgaccgccgccgggatcactctcggcatggacgagctgtacaagtaa

SEQ ID NO: 200 - protein, 1721 aa, Artificial Sequence
  Description of Artificial Sequence: Synthetic polypeptide
  Nup153-EGFP 149TAG
  MOD_RES (1632)..(1632): Any non-canonical amino acid
MASGAGGVGGGGGGKIRTRRCHQGPIKPYQQGRQQHQGILSRVTESVKNIVPGWLQRYFNKNEDVCSCSTDTSEVPRWPENKEDHLVYADEESSNITDGRITPEPAVSNTEEPSTTSTASNYPDVLTRPSLHRSHLNFSMLESPALHCQPSTSSAFPIGSSGFSLVKEIKDSTSQHDDDNISTTSGFSSRASDKDITVSKNTSLPPLWSPEAERSHSLSQHTATSSKKPAFNLSAFGTLSPSLGNSSILKTSQLGDSPFYPGKTTYGGAAAAVRQSKLRNTPYQAPVRRQMKAKQLSAQSYGVTSSTARRILQSLEKMSSPLADAKRIPSIVSSPLNSPLDRSGIDITDFQAKREKVDSQYPPVQRLMTPKPVSIATNRSVYFKPSLTPSGEFRKTNQRIDNKCSTGYEKNMTPGQNREQRESGFSYPNFSLPAANGLSSGVGGGGGKMRRERHAFVASKPLEEEEMEVPVLPKISLPITSSSLPTFNFSSPEITTSSPSPINSSQALTNKVQMTSPSSTGSPMFKFSSPIVKSTEANVLPPSSIGFTFSVPVAKTAELSGSSSTLEPIISSSAHHVTTVNSTNCKKTPPEDCEGPFRPAEILKEGSVLDILKSPGFASPKIDSVAAQPTATSPVVYTRPAISSFSSSGIGFGESLKAGSSWQCDTCLLQNKVTDNKCIACQAAKLSPRDTAKQTGIETPNKSGKTTLSASGTGFGDKFKPVIGTWDCDTCLVQNKPEAIKCVACETPKPGTCVKRALTLTVVSESAETMTASSSSCTVTTGTLGFGDKFKRPIGSWECSVCCVSNNAEDNKCVSCMSEKPGSSVPASSSSTVPVSLPSGGSLGLEKFKKPEGSWDCELCLVQNKADSTKCLACESAKPGTKSGFKGFDTSSSSSNSAASSSFKFGVSSSSSGPSQTLTSTGNFKFGDQGGFKIGVSSDSGSINPMSEGFKFSKPIGDFKFGVSSESKPEEVKKDSKNDNFKFGLSSGLSNPVSLTPFQFGVSNLGQEEKKEELPKSSSAGFSFGTGVINSTPAPANTIVTSENKSSFNLGTIETKSASVAPFTCKTSEAKKEEMPATKGGFSFGNVEPASLPSASVFVLGRTEEKQQEPVTSTSLVFGKKADNEEPKCQPVFSFGNSEQTKDENSSKSTFSFSMTKPSEKESEQPAKATFAFGAQTSTTADQGAAKPVFSFLNNSSSSSSTPATSAGGGIFGSSTSSSNPPVATFVFGQSSNPVSSSAFGNTAESSTSQSLLFSQDSKLATTSSTGTAVTPFVFGPGASSNNTTTSGFGFGATTTSSSAGSSFVFGTGPSAPSASPAFGANQTPTFGQSQGASQPNPPGFGSISSSTALFPTGSQPAPPTFGTVSSSSQPPVFGQQPSQSAFGSGTTPNSSSAFQFGSSTTNFNFTNNSPSGVFTFGANSSTPAASAQPSGSGGFPFNQSPAAFTVGSNGKNVFSSSGTSFSGRKIKTAVRRRKADPPVATRVSKGEELFTGVVPILVELDGDVNGHKFSVSGEGEGDATYGKLTLKFICTTGKLPVPWPTLVTTLTYGVQCFSRYPDHMKQHDFFKSAMPEGYVQERTIFFKDDGNYKTRAEVKFEGDTLVNRIELKGIDFKEDGNILGHKLEYNYNSHXVYIMADKQKNGIKVNFKIRHNIEDGSVQLADHYQQNTPIGDGPVLLPDNHYLSTQSALSKDPNEKRDHMVLLEFVTAAGITLGMDELYK

SEQ ID NO: 201 - DNA, 5253 bp, Artificial Sequence
  Description of Artificial Sequence: Synthetic polynucleotide
  Nup153-EGFP 149TAG-MS2
atggcgtctggtgctggcggtgttggtggaggaggtgggggtaaaattcgtactcgtcgctgtcatcaaggtccgattaaaccgtatcagcagggacgtcagcaacatcagggtattctgagccgtgtgaccgaaagcgtgaaaaacattgtgccgggttggctgcaacgttatttcaacaaaaatgaggatgtgtgttcgtgttctaccgataccagtgaagttcctcgttggccggaaaacaaagaagatcacctggtgtatgccgatgaagaatcgagcaatatcaccgatggccgtattactcctgaaccggcggttagtaacactgaagaaccgtcaaccacaagcacagcatcgaactatccagatgtcctgactcgcccttctctgcaccgttctcacctgaactttagcatgctggaatcaccagctctgcattgtcagccgtctaccagtagtgccttcccgattggctctagtggcttttcgctggtcaaagagatcaaagactcgacctctcaacatgacgatgataacattagcacgacctcgggttttagtagccgtgcctccgataaagacattaccgtgagcaaaaacacctctctgccgcctctgtggagtcctgaagccgaacgctctcatagtctgtctcagcacacagccaccagttccaaaaaaccagccttcaacctgagcgcctttggtacactgtcaccgagcctgggaaattcctctatcctgaaaacatcacagctgggcgatagtccgttttatccgggcaaaacgacgtatggtggtgccgctgctgctgttcgccagtctaaactgcgtaacactccgtatcaagctccagtccgtcgccaaatgaaagcaaaacaactgtcggcccagtcttatggtgtgacaagctctacagctcgtcgtatcctgcaaagtctggagaaaatgtcatctccgctggcagatgccaaacgtattccgtccattgtgagcagtccgctgaatagcccgctggaccgtagtgggatcgatatcaccgacttccaagccaaacgtgagaaagtggatagccagtatccgcctgtacaacgtctgatgaccccgaaaccggtttcaattgccacgaatcgtagcgtgtatttcaaaccgtcactgacccctagtggtgagtttcgtaaaacaaatcagcgtatcgacaacaaatgctctaccgggtatgaaaaaaacatgacgccgggacagaatcgtgaacaacgtgaatctggcttctcttatccgaactttagtctgccggcagcaaatggtctgagtagcggtgtaggaggtggtgggggcaaaatgcgccgtgaacgtcacgcctttgtggcctctaaacctctggaagaagaagagatggaggttcctgtactgccgaaaatcagtctgcctatcacctcttcaagtctgccgaccttcaacttttctagtccggaaatcacaacctctagcccgtcaccgattaatagcagtcaagcactgacgaataaagtccaaatgacctcaccgagttctacgggttctccgatgttcaaattctctagtcctatcgtgaaatcaaccgaagcgaacgtcctgcctccttctagtattgggttcacctttagcgtcccagtggccaaaacagctgaactgagcggtagcagtagtactctggaaccgattatcagctcaagcgcccatcatgtcactaccgtgaatagcacaaactgtaaaaaaacgccgcctgaggactgtgaaggaccgtttcgtcctgccgaaatcctgaaagaaggttccgtcctggacattctgaaatctccgggatttgcctctcctaaaatcgactctgttgccgctcaaccaactgccacatcaccggtggtttatactcgtccggcgattagcagttttagcagtagtggcatcggttttggtgaatccctgaaagctggctcatcttggcagtgtgacacctgcctgctgcaaaacaaagtgaccgataacaaatgtattgcctgtcaggccgccaaactgtctcctcgtgatacagccaaacagaccggcatcgaaacccctaataaaagcgggaaaacgaccctgtcagcaagtggtacgggatttggggacaaattcaaacctgtgatcggcacatgggactgtgacacttgtctggtacagaacaaaccagaagcgatcaaatgtgtggcctgtgaaacgcctaaacctggaacatgtgtgaaacgtgccctgactctgactgttgtgtcagaaagcgccgaaaccatgacggcaagcagctcatcctgtactgtgactaccgggactctgggatttggtgacaaattcaaacgcccgattggttcctgggaatgctccgtgtgttgtgtgagcaataatgccgaggacaacaaatgtgtgtcctgtatgagcgagaaacctggcagctctgttcctgctagcagctctagcacagttcctgttagtctgcctagtggtggttctctgggtctggaaaaattcaaaaaacctgaaggaagctgggattgtgagctgtgcctggtacagaataaagcggatagcacgaaatgtctggcctgtgagtcagccaaaccagggactaaaagcggctttaaaggcttcgacacgtcgagcagttctagtaacagcgccgcctcatcatctttcaaatttggggtgagcagctcctctagtggtcctagtcaaacactgacctctaccggaaacttcaaattcggcgatcagggtggcttcaaaattggtgtctcctctgattcgggtagcattaacccgatgagtgaggggttcaaattcagcaaaccaattggcgatttcaaattcggtgtgtcgtctgaatccaaacctgaagaagtcaaaaaagacagcaaaaacgacaatttcaaattcggcctgtctagtggtctgtctaatccggttagcctgaccccgtttcagttcggggtgtctaatctgggtcaggaagagaaaaaagaggagctgcctaaaagttcatctgccgggttcagttttggtacaggcgtgatcaatagcactccagcaccagccaatacaatcgtgacgagcgagaacaaatcgagcttcaacctggggacaatcgaaacgaaaagcgccagtgtagcgccattcacgtgtaaaacctccgaggcaaaaaaagaagagatgccggccacaaaaggtggattctcattcggcaacgtggaaccggctagcctgccatcagcaagcgtgtttgtactgggccgtaccgaggagaaacagcaggaacctgttactagcaccagtctggtctttggtaaaaaagccgacaacgaagaaccgaaatgtcagccagtgttcagcttcggcaatagcgaacagacgaaagacgaaaacagcagcaaatcgacgttcagcttcagtatgacgaaaccgagcgaaaaagaaagtgagcagccagcaaaagcaacgttcgcctttggagcacagacatcaaccacagccgatcaaggagcagcgaaaccagttttcagttttctgaataacagctcaagcagcagttctacaccagcaacctcagcaggtggtgggatctttggatcaagcacctcatccagcaatccgccagtggcaacattcgtgtttggccagagcagtaatccggtgtcatcttcagcatttgggaataccgccgagagtagcacatcacagtctctgctgttctcacaggactctaaactggcaaccacctcttctactggtacagcggttaccccgtttgtgttcggtccgggagcatcatccaataataccacgacgtcgggctttgggtttggtgccacgacaacaagcagtagcgctggtagcagctttgtctttggcacaggtccttcagcaccttctgcttcaccagctttcggagccaatcagactccgacattcggacagtcacagggtgcctctcaaccaaatcctccgggttttggcagtattagcagtagtaccgccctgttcccgaccggtagtcaaccggcaccgccaacatttggaacggttagcagtagtagtcagcctccggtgtttggacaacaaccgagccagagcgccttcggatcaggaacgacccctaatagtagcagtgccttccagttcggtagcagtaccaccaacttcaacttcacgaacaatagcccgtcaggtgtgttcacgtttggcgccaattcttctaccccagcggcaagtgctcaaccttcaggctcaggtggatttcctttcaaccagtcaccagcagcgtttactgttggttctaacgggaaaaacgttttcagtagcagcggcacctcgttttctggtcgtaaaatcaaaacggccgttcgtcgccgtaaagcggatccaccggtcgccacgagagtgagcaagggcgaggagctgttcaccggggtggtgcccatcctggtcgagctggacggcgacgtaaacggccacaagttcagcgtgtccggcgagggcgagggcgatgccacctacggcaagctgaccctgaagttcatctgcaccaccggcaagctgcccgtgccctggcccaccctcgtgaccaccctgacctacggcgtgcagtgcttcagccgctaccccgaccacatgaagcagcacgacttcttcaagtccgccatgcccgaaggctacgtccaggagcgcaccatcttcttcaaggacgacggcaactacaagacccgcgccgaggtgaagttcgagggcgacaccctggtgaaccgcatcgagctgaagggcatcgacttcaaggaggacggcaacatcctggggcacaagctggagtacaactacaacagccactaggtctatatcatggccgacaagcagaagaacggcatcaaggtgaacttcaagatccgccacaacatcgaggacggcagcgtgcagctcgccgaccactaccagcagaacacccccatcggcgacggccccgtgctgctgcccgacaaccactacctgagcacccagtccgccctgagcaaagaccccaacgagaagcgcgatcacatggtcctgctggagttcgtgaccgccgccgggatcactctcggcatggacgagctgtacaagtaaagcggccgcgactctagatcataatcagcacatgaggatcacccatgtctgcaggtcgactctagaaaacatgaggatcacccatgt

SEQ ID NO: 202 - protein, 1721 aa, Artificial Sequence; identical to SEQ ID NO: 200
  Description of Artificial Sequence: Synthetic polypeptide
  Nup153-EGFP 149TAG-MS2
  MOD_RES (1632)..(1632): Any non-canonical amino acid

SEQ ID NO: 203 - DNA, 2130 bp, Artificial Sequence
  Description of Artificial Sequence: Synthetic polynucleotide
  Vim 116TAG-mOrange
atgtccaccaggtccgtgtcctcgtcctcctaccgcaggatgttcggcggcccgggcaccgcgagccggccgagctccagccggagctacgtgactacgtccacccgcacctacagcctgggcagcgcgctgcgccccagcaccagccgcagcctctacgcctcgtccccgggcggcgtgtatgccacgcgctcctctgccgtgcgcctgcggagcagcgtgcccggggtgcggctcctgcaggactcggtggacttctcgctggccgacgccatcaacaccgagttcaagaacacccgcaccaacgagaaggtggagctgcaggagctgaatgaccgcttcgcctagtacatcgacaaggtgcgcttcctggagcagcagaataagatcctgctggccgagctcgagcagctcaagggccaaggcaagtcgcgcctgggggacctctacgaggaggagatgcgggagctgcgccggcaggtggaccagctaaccaacgacaaagcccgcgtcgaggtggagcgcgacaacctggccgaggacatcatgcgcctccgggagaaattgcaggaggagatgcttcagagagaggaagccgaaaacaccctgcaatctttcagacaggatgttgacaatgcgtctctggcacgtcttgaccttgaacgcaaagtggaatctttgcaagaagagattgcctttttgaagaaactccacgaagaggaaatccaggagctgcaggctcagattcaggaacagcatgtccaaatcgatgtggatgtttccaagcctgacctcacggctgccctgcgtgacgtacgtcagcaatatgaaagtgtggctgccaagaacctgcaggaggcagaagaatggtacaaatccaagtttgctgacctctctgaggctgccaaccggaacaatgacgccctgcgccaggcaaagcaggagtccactgagtaccggagacaggtgcagtccctcacctgtgaagtggatgcccttaaaggaaccaatgagtccctggaacgccagatgcgtgaaatggaagagaactttgccgttgaagctgctaactaccaagacactattggccgcctgcaggatgagattcagaatatgaaggaggaaatggctcgtcaccttcgtgaataccaagacctgctcaatgttaagatggcccttgacattgagattgccacctacaggaagctgctggaaggcgaggagagcaggatttctctgcctcttccaaacttttcctccctgaacctgagggaaactaatctggattcactccctctggttgatacccactcaaaaaggacacttctgattaagacggttgaaactagagatggacaggttatcaacgaaacttctcagcatcacgatgaccttgaaggggatccaccggtcgccaccatggtgagcaagggcgaggagaataatatggccatcatcaaggagttcatgcgcttcaaggtgcgcatggagggcaccgtgaacggccacgagttcgagatcgagggcgagggcgagggccgcccctacgagggctttcagaccgctaagctgaaggtgaccaagggcggccccctgcccttcgcctgggacatcctgtcccctctcttcacctacggctccaaggcctacgtgaagcaccccgccgacatccccgactacttcaagctgtccttccccgagggcttcaagtgggagcgcgtgatgaactacgaggacggcggcgtggtgaccgtgacccaggactcctcactgcaggacggcgagttcatctacaaggtgaagatgcgcggcaccaacttcccctccgacggccccgtgatgcagaagaagaccatgggctgggaggcctcctccgagcggatgtaccccgaggacggcgccctgaagggcgagatcaggatgaggctgaagctgaaggacggcggccactacacctccgaggtcaagaccacctacaaggccaagaagtccgtgcagctgcccggcgcctacatcgtcggcatcaagctggacatcacctcccacaacgaggactacaccatcgtggaacagtacgaacgcgccgagggccgccactccaccggcggcatggacgagctgtacaagtaa

SEQ ID NO: 204 - protein, 709 aa, Artificial Sequence
  Description of Artificial Sequence: Synthetic polypeptide
  Vim 116TAG-mOrange
  MOD_RES (116)..(116): Any non-canonical amino acid
MSTRSVSSSSYRRMFGGPGTASRPSSSRSYVTTSTRTYSLGSALRPSTSRSLYASSPGGVYATRSSAVRLRSSVPGVRLLQDSVDFSLADAINTEFKNTRTNEKVELQELNDRFAXYIDKVRFLEQQNKILLAELEQLKGQGKSRLGDLYEEEMRELRRQVDQLTNDKARVEVERDNLAEDIMRLREKLQEEMLQREEAENTLQSFRQDVDNASLARLDLERKVESLQEEIAFLKKLHEEEIQELQAQIQEQHVQIDVDVSKPDLTAALRDVRQQYESVAAKNLQEAEEWYKSKFADLSEAANRNNDALRQAKQESTEYRRQVQSLTCEVDALKGTNESLERQMREMEENFAVEAANYQDTIGRLQDEIQNMKEEMARHLREYQDLLNVKMALDIEIATYRKLLEGEESRISLPLPNFSSLNLRETNLDSLPLVDTHSKRTLLIKTVETRDGQVINETSQHHDDLEGDPPVATMVSKGEENNMAIIKEFMRFKVRMEGTVNGHEFEIEGEGEGRPYEGFQTAKLKVTKGGPLPFAWDILSPLFTYGSKAYVKHPADIPDYFKLSFPEGFKWERVMNYEDGGVVTVTQDSSLQDGEFIYKVKMRGTNFPSDGPVMQKKTMGWEASSERMYPEDGALKGEIRMRLKLKDGGHYTSEVKTTYKAKKSVQLPGAYIVGIKLDITSHNEDYTIVEQYERAEGRHSTGGMDELYK

SEQ ID NO: 205 - DNA, 2217 bp, Artificial Sequence
  Description of Artificial Sequence: Synthetic polynucleotide
  Vim 116TAG-mOrange-MS2
atgtccaccaggtccgtgtcctcgtcctcctaccgcaggatgttcggcggcccgggcaccgcgagccggccgagctccagccggagctacgtgactacgtccacccgcacctacagcctgggcagcgcgctgcgccccagcaccagccgcagcctctacgcctcgtccccgggcggcgtgtatgccacgcgctcctctgccgtgcgcctgcggagcagcgtgcccggggtgcggctcctgcaggactcggtggacttctcgctggccgacgccatcaacaccgagttcaagaacacccgcaccaacgagaaggtggagctgcaggagctgaatgaccgcttcgcctagtacatcgacaaggtgcgcttcctggagcagcagaataagatcctgctggccgagctcgagcagctcaagggccaaggcaagtcgcgcctgggggacctctacgaggaggagatgcgggagctgcgccggcaggtggaccagctaaccaacgacaaagcccgcgtcgaggtggagcgcgacaacctggccgaggacatcatgcgcctccgggagaaattgcaggaggagatgcttcagagagaggaagccgaaaacaccctgcaatctttcagacaggatgttgacaatgcgtctctggcacgtcttgaccttgaacgcaaagtggaatctttgcaagaagagattgcctttttgaagaaactccacgaagaggaaatccaggagctgcaggctcagattcaggaacagcatgtccaaatcgatgtggatgtttccaagcctgacctcacggctgccctgcgtgacgtacgtcagcaatatgaaagtgtggctgccaagaacctgcaggaggcagaagaatggtacaaatccaagtttgctgacctctctgaggctgccaaccggaacaatgacgccctgcgccaggcaaagcaggagtccactgagtaccggagacaggtgcagtccctcacctgtgaagtggatgcccttaaaggaaccaatgagtccctggaacgccagatgcgtgaaatggaagagaactttgccgttgaagctgctaactaccaagacactattggccgcctgcaggatgagattcagaatatgaaggaggaaatggctcgtcaccttcgtgaataccaagacctgctcaatgttaagatggcccttgacattgagattgccacctacaggaagctgctggaaggcgaggagagcaggatttctctgcctcttccaaacttttcctccctgaacctgagggaaactaatctggattcactccctctggttgatacccactcaaaaaggacacttctgattaagacggttgaaactagagatggacaggttatcaacgaaacttctcagcatcacgatgaccttgaaggggatccaccggtcgccaccatggtgagcaagggcgaggagaataatatggccatcatcaaggagttcatgcgcttcaaggtgcgcatggagggcaccgtgaacggccacgagttcgagatcgagggcgagggcgagggccgcccctacgagggctttcagaccgctaagctgaaggtgaccaagggcggccccctgcccttcgcctgggacatcctgtcccctctcttcacctacggctccaaggcctacgtgaagcaccccgccgacatccccgactacttcaagctgtccttccccgagggcttcaagtgggagcgcgtgatgaactacgaggacggcggcgtggtgaccgtgacccaggactcctcactgcaggacggcgagttcatctacaaggtgaagatgcgcggcaccaacttcccctccgacggccccgtgatgcagaagaagaccatgggctgggaggcctcctccgagcggatgtaccccgaggacggcgccctgaagggcgagatcaggatgaggctgaagctgaaggacggcggccactacacctccgaggtcaagaccacctacaaggccaagaagtccgtgcagctgcccggcgcctacatcgtcggcatcaagctggacatcacctcccacaacgaggactacaccatcgtggaacagtacgaacgcgccgagggccgccactccaccggcggcatggacgagctgtacaagtaaagcggccgcgactctagatcataatcagcacatgaggatcacccatgtctgcaggtcgactctagaaaacatgaggatcacccatgt

SEQ ID NO: 206 - protein, 709 aa, Artificial Sequence; identical to SEQ ID NO: 204
  Description of Artificial Sequence: Synthetic polypeptide
  Vim 116TAG-mOrange-MS2
  MOD_RES (116)..(116): Any non-canonical amino acid

SEQ ID NO: 207 - DNA, 4893 bp, Artificial Sequence
  Description of Artificial Sequence: Synthetic polynucleotide
  INSR 676TAG-EGFP
atgggcaccgggggccggcggggggcggcggccgcgccgctgctggtggcggtggccgcgctgctactgggcgccgcgggccacctgtaccccggagaggtgtgtcccggcatggatatccggaacaacctcactaggttgcatgagctggagaattgctctgtcatcgaaggacacttgcagatactcttgatgttcaaaacgaggcccgaagatttccgagacctcagtttccccaaactcatcatgatcactgattacttgctgctcttccgggtctatgggctcgagagcctgaaggacctgttccccaacctcacggtcatccggggatcacgactgttctttaactacgcgctggtcatcttcgagatggttcacctcaaggaactcggcctctacaacctgatgaacatcacccggggttctgtccgcatcgagaagaacaatgagctctgttacttggccactatcgactggtcccgtatcctggattccgtggaggataattacatcgtgttgaacaaagatgacaacgaggagtgtggagacatctgtccgggtaccgcgaagggcaagaccaactgccccgccaccgtcatcaacgggcagtttgtcgaacgatgttggactcatagtcactgccagaaagtttgcccgaccatctgtaagtcacacggctgcaccgccgaaggcctctgttgccacagcgagtgcctgggcaactgttctcagcccgacgaccccaccaagtgcgtggcctgccgcaacttctacctggatggcaggtgtgtggagacctgcccgcccccgtactaccacttccaggactggcgctgtgtgaacttcagcttctgccaggacctgcaccacaaatgcaagaactcgcggaggcagggctgccaccagtacgtcattcacaacaacaagtgcatccctgagtgtccctccgggtacacgatgaattccagcaacttgctgtgcaccccatgcctgggtccctgtcccaaggtgtgccacctcctagaaggcgagaagaccatcgactcggtgacgtctgcccaggagctccgaggatgcaccgtcatcaacgggagtctgatcatcaacattcgaggaggcaacaatctggcagctgagctagaagccaacctcggcctcattgaagaaatttcagggtatctaaaaatccgccgatcctacgctctggtgtcactttccttcttccggaagttacgtctgattcgaggagagaccttggaaattgggaactactccttctatgccttggacaaccagaacctaaggcagctctgggactggagcaaacacaacctcaccatcactcaggggaaactcttcttccactataaccccaaactctgcttgtcagaaatccacaagatggaagaagtttcaggaaccaaggggcgccaggagagaaacgacattgccctgaagaccaatggggaccaggcatcctgtgaaaatgagttacttaaattttcttacattcggacatcttttgacaagatcttgctgagatgggagccgtactggccccccgacttccgagacctcttggggttcatgctgttctacaaagaggccccttatcagaatgtgacggagttcgacgggcaggatgcatgtggttccaacagttggacggtggtagacattgacccacccctgaggtccaacgaccccaaatcacagaaccacccagggtggctgatgcggggtctcaagccctggacccagtatgccatctttgtgaagaccctggtcaccttttcggatgaacgccggacctatggggccaagagtgacatcatttatgtccagacagatgccaccaacccctctgtgcccctggatccaatctcagtgtctaactcatcatcccagattattctgaagtggaaaccaccctccgaccccaatggcaacatcacccactacctggttttctgggagaggcaggcggaagacagtgagctgttcgagctggattattgcctctaggggctgaagctgccctcgaggacctggtctccaccattcgagtctgaagattctcagaagcacaaccagagtgagtatgaggattcggccggcgaatgctgctcctgtccaaagacagactctcagatcctgaaggagctggaggagtcctcgtttaggaagacgtttgaggattacctgcacaacgtggttttcgtccccagaaaaacctcttcaggcactggtgccgaggaccctaggccatctcggaaacgcaggtcccttggcgatgttgggaatgtgacggtggccgtgcccacggtggcagctttccccaacacttcctcgaccagcgtgcccacgagtccggaggagcacaggccttttgagaaggtggtgaacaaggagtcgctggtcatctccggcttgcgacacttcacgggctatcgcatcgagctgcaggcttgcaaccaggacacccctgaggaacggtgcagtgtggcagcctacgtcagtgcgaggaccatgcctgaagccaaggctgatgacattgttggccctgtgacgcatgaaatctttgagaacaacgtcgtccacttgatgtggcaggagccgaaggagcccaatggtctgatcgtgctgtatgaagtgagttatcggcgatatggtgatgaggagctgcatctctgcgtctcccgcaagcacttcgctctggaacggggctgcaggctgcgtgggctgtcaccggggaactacagcgtgcgaatccgggccacctcccttgcgggcaacggctcttggacggaacccacctatttctacgtgacagactatttagacgtcccgtcaaatattgcaaaaattatcatcggccccctcatctttgtctttctcttcagtgttgtgattggaagtatttatctattcctgagaaagaggcagccagatgggccgctgggaccgctttacgcttcttcaaaccctgagtatctcagtgccagtgatgtgtttccatgctctgtgtacgtgccggacgagtgggaggtgtctcgagagaagatcaccctccttcgagagctggggcagggctccttcggcatggtgtatgagggcaatgccagggacatcatcaagggtgaggcagagacccgcgtggcggtgaagacggtcaacgagtcagccagtctccgagagcggattgagttcctcaatgaggcctcggtcatgaagggcttcacctgccatcacgtggtgcgcctcctgggagtggtgtccaagggccagcccacgctggtggtgatggagctgatggctcacggagacctgaagagctacctccgttctctgcggccagaggctgagaataatcctggccgccctccccctacccttcaagagatgattcagatggcggcagagattgctgacgggatggcctacctgaacgccaagaagtttgtgcatcgggacctggcagcgagaaactgcatggtcgcccatgattttactgtcaaaattggagactttggaatgaccagagacatctatgaaacggattactaccggaaagggggcaagggtctgctccctgtacggtggatggcaccggagtccctgaaggatggggtcttcaccacttcttctgacatgtggtcctttggcgtggtcctttgggaaatcaccagcttggcagaacagccttaccaaggcctgtctaatgaacaggtgttgaaatttgtcatggatggagggtatctggatcaacccgacaactgtccagagagagtcactgacctcatgcgcatgtgctggcaattcaaccccaacatgaggccaaccttcctggagattgtcaacctgctcaaggacgacctgcaccccagctttccagaggtgtcgttcttccacagcgaggagaacaaggctcccgagagtgaggagctggagatggagtttgaggacatggagaatgtgcccctggaccgttcctcgcactgtcagagggaggaggcggggggccgggatggagggtcctcgctgggtttcaagcggagctacgaggaacacatcccttacacacacatgaacggaggcaagaaaaacgggcggattctgaccttgcctcggtccaatccttcctgggcccgggatccaccggtcgccaccatggtgagcaagggcgaggagctgttcaccggggtggtgcccatcctggtcgagctggacggcgacgtaaacggccacaagttcagcgtgtccggcgagggcgagggcgatgccacctacggcaagctgaccctgaagttcatctgcaccaccggcaagctgcccgtgccctggcccaccctcgtgaccaccctgacctacggcgtgcagtgcttcagccgctaccccgaccacatgaagcagcacgacttcttcaagtccgccatgcccgaaggctacgtccaggagcgcaccatcttcttcaaggacgacggcaactacaagacccgcgccgaggtgaagttcgagggcgacaccctggtgaaccgcatcgagctgaagggcatcgacttcaaggaggacggcaacatcctggggcacaagctggagtacaactacaacagccacaacgtctatatcatggccgacaagcagaagaacggcatcaaggtgaacttcaagatccgccacaacatcgaggacggcagcgtgcagctcgccgaccactaccagcagaacacccccatcggcgacggccccgtgctgctgcccgacaaccactacctgagcacccagtccgccctgagcaaagaccccaacgagaagcgcgatcacatggtcctgctggagttcgtgaccgccgccgggatcactctcggcatggacgagctgtacaagtaa

SEQ ID NO: 208 - protein, 1630 aa, Artificial Sequence
  Description of Artificial Sequence: Synthetic polypeptide
  INSR 676TAG-EGFP
  MOD_RES (676)..(676): Any non-canonical amino acid
MGTGGRRGAAAAPLLVAVAALLLGAAGHLYPGEVCPGMDIRNNLTRLHELENCSVIEGHLQILLMFKTRPEDFRDLSFPKLIMITDYLLLFRVYGLESLKDLFPNLTVIRGSRLFFNYALVIFEMVHLKELGLYNLMNITRGSVRIEKNNELCYLATIDWSRILDSVEDNYIVLNKDDNEECGDICPGTAKGKTNCPATVINGQFVERCWTHSHCQKVCPTICKSHGCTAEGLCCHSECLGNCSQPDDPTKCVACRNFYLDGRCVETCPPPYYHFQDWRCVNFSFCQDLHHKCKNSRRQGCHQYVIHNNKCIPECPSGYTMNSSNLLCTPCLGPCPKVCHLLEGEKTIDSVTSAQELRGCTVINGSLIINIRGGNNLAAELEANLGLIEEISGYLKIRRSYALVSLSFFRKLRLIRGETLEIGNYSFYALDNQNLRQLWDWSKHNLTITQGKLFFHYNPKLCLSEIHKMEEVSGTKGRQERNDIALKTNGDQASCENELLKFSYIRTSFDKILLRWEPYWPPDFRDLLGFMLFYKEAPYQNVTEFDGQDACGSNSWTVVDIDPPLRSNDPKSQNHPGWLMRGLKPWTQYAIFVKTLVTFSDERRTYGAKSDIIYVQTDATNPSVPLDPISVSNSSSQIILKWKPPSDPNGNITHYLVFWERQAEDSELFELDYCLXGLKLPSRTWSPPFESEDSQKHNQSEYEDSAGECCSCPKTDSQILKELEESSFRKTFEDYLHNVVFVPRKTSSGTGAEDPRPSRKRRSLGDVGNVTVAVPTVAAFPNTSSTSVPTSPEEHRPFEKVVNKESLVISGLRHFTGYRIELQACNQDTPEERCSVAAYVSARTMPEAKADDIVGPVTHEIFENNVVHLMWQEPKEPNGLIVLYEVSYRRYGDEELHLCVSRKHFALERGCRLRGLSPGNYSVRIRATSLAGNGSWTEPTYFYVTDYLDVPSNIAKIIIGPLIFVFLFSVVIGSIYLFLRKRQPDGPLGPLYASSNPEYLSASDVFPCSVYVPDEWEVSREKITLLRELGQGSFGMVYEGNARDIIKGEAETRVAVKTVNESASLRERIEFLNEASVMKGFTCHHVVRLLGVVSKGQPTLVVMELMAHGDLKSYLRSLRPEAENNPGRPPPTLQEMIQMAAEIADGMAYLNAKKFVHRDLAARNCMVAHDFTVKIGDFGMTRDIYETDYYRKGGKGLLPVRWMAPESLKDGVFTTSSDMWSFGVVLWEITSLAEQPYQGLSNEQVLKFVMDGGYLDQPDNCPERVTDLMRMCWQFNPNMRPTFLEIVNLLKDDLHPSFPEVSFFHSEENKAPESEELEMEFEDMENVPLDRSSHCQREEAGGRDGGSSLGFKRSYEEHIPYTHMNGGKKNGRILTLPRSNPSWARDPPVATMVSKGEELFTGVVPILVELDGDVNGHKFSVSGEGEGDATYGKLTLKFICTTGKLPVPWPTLVTTLTYGVQCFSRYPDHMKQHDFFKSAMPEGYVQERTIFFKDDGNYKTRAEVKFEGDTLVNRIELKGIDFKEDGNILGHKLEYNYNSHNVYIMADKQKNGIKVNFKIRHNIEDGSVQLADHYQQNTPIGDGPVLLPDNHYLSTQSALSKDPNEKRDHMVLLEFVTAAGITLGMDELYK

SEQ ID NO: 209 - DNA, 4988 bp, Artificial Sequence
  Description of Artificial Sequence: Synthetic polynucleotide
  INSR 676TAG-EGFP-MS2
atgggcaccgggggccggcggggggcggcggccgcgccgctgctggtggcggtggccgcgctgctactgggcgccgcgggccacctgtaccccggagaggtgtgtcccggcatggatatccggaacaacctcactaggttgcatgagctggagaattgctctgtcatcgaaggacacttgcagatactcttgatgttcaaaacgaggcccgaagatttccgagacctcagtttccccaaactcatcatgatcactgattacttgctgctcttccgggtctatgggctcgagagcctgaaggacctgttccccaacctcacggtcatccggggatcacgactgttctttaactacgcgctggtcatcttcgagatggttcacctcaaggaactcggcctctacaacctgatgaacatcacccggggttctgtccgcatcgagaagaacaatgagctctgttacttggccactatcgactggtcccgtatcctggattccgtggaggataattacatcgtgttgaacaaagatgacaacgaggagtgtggagacatctgtccgggtaccgcgaagggcaagaccaactgccccgccaccgtcatcaacgggcagtttgtcgaacgatgttggactcatagtcactgccagaaagtttgcccgaccatctgtaagtcacacggctgcaccgccgaaggcctctgttgccacagcgagtgcctgggcaactgttctcagcccgacgaccccaccaagtgcgtggcctgccgcaacttctacctggatggcaggtgtgtggagacctgcccgcccccgtactaccacttccaggactggcgctgtgtgaacttcagcttctgccaggacctgcaccacaaatgcaagaactcgcggaggcagggctgccaccagtacgtcattcacaacaacaagtgcatccctgagtgtccctccgggtacacgatgaattccagcaacttgctgtgcaccccatgcctgggtccctgtcccaaggtgtgccacctcctagaaggcgagaagaccatcgactcggtgacgtctgcccaggagctccgaggatgcaccgtcatcaacgggagtctgatcatcaacattcgaggaggcaacaatctggcagctgagctagaagccaacctcggcctcattgaagaaatttcagggtatctaaaaatccgccgatcctacgctctggtgtcactttccttcttccggaagttacgtctgattcgaggagagaccttggaaattgggaactactccttctatgccttggacaaccagaacctaaggcagctctgggactggagcaaacacaacctcaccatcactcaggggaaactcttcttccactataaccccaaactctgcttgtcagaaatccacaagatggaagaagtttcaggaaccaaggggcgccaggagagaaacgacattgccctgaagaccaatggggaccaggcatcctgtgaaaatgagttacttaaattttcttacattcggacatcttttgacaagatcttgctgagatgggagccgtactggccccccgacttccgagacctcttggggttcatgctgttctacaaagaggccccttatcagaatgtgacggagttcgacgggcaggatgcatgtggttccaacagttggacggtggtagacattgacccacccctgaggtccaacgaccccaaatcacagaaccacccagggtggctgatgcggggtctcaagccctggacccagtatgccatctttgtgaagaccctggtcaccttttcggatgaacgccggacctatggggccaagagtgacatcatttatgtccagacagatgccaccaacccctctgtgcccctggatccaatctcagtgtctaactcatcatcccagattattctgaagtggaaaccaccctccgaccccaatggcaacatcacccactacctggttttctgggagaggcaggcggaagacagtgagctgttcgagctggattattgcctctaggggctgaagctgccctcgaggacctggtctccaccattcgagtctgaagattctcagaagcacaaccagagtgagtatgaggattcggccggcgaatgctgctcctgtccaaagacagactctcagatcctgaaggagctggaggagtcctcgtttaggaagacgtttgaggattacctgcacaacgtggttttcgtccccagaaaaacctcttcaggcactggtgccgaggaccctaggccatctcggaaacgcaggtcccttggcgatgttgggaatgtgacggtggccgtgcccacggtggcagctttccccaacacttcctcgaccagcgtgcccacgagtccggaggagcacaggccttttgagaaggtggtgaacaaggagtcgctggtcatctccggcttgcgacacttcacgggctatcgcatcgagctgcaggcttgcaaccaggacacccctgaggaacggtgcagtgtggcagcctacgtcagtgcgaggaccatgcctgaagccaaggctgatgacattgttggccctgtgacgcatgaaatctttgagaacaacgtcgtccacttgatgtggcaggagccgaaggagcccaatggtctgatcgtgctgtatgaagtgagttatcggcgatatggtgatgaggagctgcatctctgcgtctcccgcaagcacttcgctctggaacggggctgcaggctgcgtgggctgtcaccggggaactacagcgtgcgaatccgggccacctcccttgcgggcaacggctcttggacggaacccacctatttctacgtgacagactatttagacgtcccgtcaaatattgcaaaaattatcatcggccccctcatctttgtctttctcttcagtgttgtgattggaagtatttatctattcctgagaaagaggcagccagatgggccgctgggaccgctttacgcttcttcaaaccctgagtatctcagtgccagtgatgtgtttccatgctctgtgtacgtgccggacgagtgggaggtgtctcgagagaagatcaccctccttcgagagctggggcagggctccttcggcatggtgtatgagggcaatgccagggacatcatcaagggtgaggcagagacccgcgtggcggtgaagacggtcaacgagtcagccagtctccgagagcggattgagttcctcaatgaggcctcggtcatgaagggcttcacctgccatcacgtggtgcgcctcctgggagtggtgtccaagggccagcccacgctggtggtgatggagctgatggctcacggagacctgaagagctacctccgttctctgcggccagaggctgagaataatcctggccgccctccccctacccttcaagagatgattcagatggcggcagagattgctgacgggatggcctacctgaacgccaagaagtttgtgcatcgggacctggcagcgagaaactgcatggtcgcccatgattttactgtcaaaattggagactttggaatgaccagagacatctatgaaacggattactaccggaaagggggcaagggtctgctccctgtacggtggatggcaccggagtccctgaaggatggggtcttcaccacttcttctgacatgtggtcctttggcgtggtcctttgggaaatcaccagcttggcagaacagccttaccaaggcctgtctaatgaacaggtgttgaaatttgtcatggatggagggtatctggatcaacccgacaactgtccagagagagtcactgacctcatgcgcatgtgctggcaattcaaccccaacatgaggccaaccttcctggagattgtcaacctgctcaaggacgacctgcaccccagctttccagaggtgtcgttcttccacagcgaggagaacaaggctcccgagagtgaggagctggagatggagtttgaggacatggagaatgtgcccctggaccgttcctcgcactgtcagagggaggaggcggggggccgggatggagggtcctcgctgggtttcaagcggagctacgaggaacacatcccttacacacacatgaacggaggcaagaaaaacgggcggattctgaccttgcctcggtccaatccttcctgggcccgggatccaccggtcgccaccatggtgagcaagggcgaggagctgttcaccggggtggtgcccatcctggtcgagctggacggcgacgtaaacggccacaagttcagcgtgtccggcgagggcgagggcgatgccacctacggcaagctgaccctgaagttcatctgcaccaccggcaagctgcccgtgccctggcccaccctcgtgaccaccctgacctacggcgtgcagtgcttcagccgctaccccgaccacatgaagcagcacgacttcttcaagtccgccatgcccgaaggctacgtccaggagcgcaccatcttcttcaaggacgacggcaactacaagacccgcgccgaggtgaagttcgagggcgacaccctggtgaaccgcatcgagctgaagggcatcgacttcaaggaggacggcaacatcctggggcacaagctggagtacaactacaacagccacaacgtctatatcatggccgacaagcagaagaacggcatcaaggtgaacttcaagatccgccacaacatcgaggacggcagcgtgcagctcgccgaccactaccagcagaacacccccatcggcgacggccccgtgctgctgcccgacaaccactacctgagcacccagtccgccctgagcaaagaccccaacgagaagcgcgatcacatggtcctgctggagttcgtgaccgccgccgggatcactctcggcatggacgagctgtacaagtaaagcggccgcgcggccgcgactctagatcataatcagcacatgaggatcacccatgtctgcaggtcgactctagaaaacatgaggatcacccatgt

SEQ ID NO: 210 - protein, 1630 aa, Artificial Sequence; identical to SEQ ID NO: 208
  Description of Artificial Sequence: Synthetic polypeptide
  INSR 676TAG-EGFP-MS2
  MOD_RES (676)..(676): Any non-canonical amino acid

SEQ ID NO: 211 - DNA, 4932 bp, Artificial Sequence
  Description of Artificial Sequence: Synthetic polynucleotide
  INSR 676TAG-mOrange-MS2
atgggcaccgggggccggcggggggcggcggccgcgccgctgctggtggcggtggccgcgctgctactgggcgccgcgggccacctgtaccccggagaggtgtgtcccggcatggatatccggaacaacctcactaggttgcatgagctggagaattgctctgtcatcgaaggacacttgcagatactcttgatgttcaaaacgaggcccgaagatttccgagacctcagtttccccaaactcatcatgatcactgattacttgctgctcttccgggtctatgggctcgagagcctgaaggacctgttccccaacctcacggtcatccggggatcacgactgttctttaactacgcgctggtcatcttcgagatggttcacctcaaggaactcggcctctacaacctgatgaacatcacccggggttctgtccgcatcgagaagaacaatgagctctgttacttggccactatcgactggtcccgtatcctggattccgtggaggataattacatcgtgttgaacaaagatgacaacgaggagtgtggagacatctgtccgggtaccgcgaagggcaagaccaactgccccgccaccgtcatcaacgggcagtttgtcgaacgatgttggactcatagtcactgccagaaagtttgcccgaccatctgtaagtcacacggctgcaccgccgaaggcctctgttgccacagcgagtgcctgggcaactgttctcagcccgacgaccccaccaagtgcgtggcctgccgcaacttctacctggatggcaggtgtgtggagacctgcccgcccccgtactaccacttccaggactggcgctgtgtgaacttcagcttctgccaggacctgcaccacaaatgcaagaactcgcggaggcagggctgccaccagtacgtcattcacaacaacaagtgcatccctgagtgtccctccgggtacacgatgaattccagcaacttgctgtgcaccccatgcctgggtccctgtcccaaggtgtgccacctcctagaaggcgagaagaccatcgactcggtgacgtctgcccaggagctccgaggatgcaccgtcatcaacgggagtctgatcatcaacattcgaggaggcaacaatctggcagctgagctagaagccaacctcggcctcattgaagaaatttcagggtatctaaaaatccgccgatcctacgctctggtgtcactttccttcttccggaagttacgtctgattcgaggagagaccttggaaattgggaactactccttctatgccttggacaaccagaacctaaggcagctctgggactggagcaaacacaacctcaccatcactcaggggaaactcttcttccactataaccccaaactctgcttgtcagaaatccacaagatggaagaagtttcaggaaccaaggggcgccaggagagaaacgacattgccctgaagaccaatggggaccaggcatcctgtgaaaatgagttacttaaattttcttacattcggacatcttttgacaagatcttgctgagatgggagccgtactggccccccgacttccgagacctcttggggttcatgctgttctacaaagaggccccttatcagaatgtgacggagttcgacgggcaggatgcatgtggttccaacagttggacggtggtagacattgacccacccctgaggtccaacgaccccaaatcacagaaccacccagggtggctgatgcggggtctcaagccctggacccagtatgccatctttgtgaagaccctggtcaccttttcggatgaacgccggacctatggggccaagagtgacatcatttatgtccagacagatgccaccaacccctctgtgcccctggatccaatctcagtgtctaactcatcatcccagattattctgaagtggaaaccaccctccgaccccaatggcaacatcacccactacctggttttctgggagaggcaggcggaagacagtgagctgttcgagctggattattgcctctaggggctgaagctgccctcgaggacctggtctccaccattcgagtctgaagattctcagaagcacaaccagagtgagtatgaggattcggccggcgaatgctgctcctgtccaaagacagactctcagatcctgaaggagctggaggagtcctcgtttaggaagacgtttgaggattacctgcacaacgtggttttcgtccccaggccatctcggaaacgcaggtcccttggcgatgttgggaatgtgacggtggccgtgcccacggtggcagctttccccaacacttcctcgaccagcgtgcccacgagtccggaggagcacaggccttttgagaaggtggtgaacaaggagtcgctggtcatctccggcttgcgacacttcacgggctatcgcatcgagctgcaggcttgcaaccaggacacccctgaggaacggtgcagtgtggcagcctacgtcagtgcgaggaccatgcctgaagccaaggctgatgacattgttggccctgtgacgcatgaaatctttgagaacaacgtcgtccacttgatgtggcaggagccgaaggagcccaatggtctgatcgtgctgtatgaagtgagttatcggcgatatggtgatgaggagctgcatctctgcgtctcccgcaagcacttcgctctggaacggggctgcaggctgcgtgggctgtcaccggggaactacagcgtgcgaatccgggccacctcccttgcgggcaacggctcttggacggaacccacctatttctacgtgacagactatttagacgtcccgtcaaatattgcaaaaattatcatcggccccctcatctttgtctttctcttcagtgttgtgattggaagtatttatctattcctgagaaagaggcagccagatgggccgctgggaccgctttacgcttcttcaaaccctgagtatctcagtgccagtgatgtgtttccatgctctgtgtacgtgccggacgagtgggaggtgtctcgagagaagatcaccctccttcgagagctggggcagggctccttcggcatggtgtatgagggcaatgccagggacatcatcaagggtgaggcagagacccgcgtggcggtgaagacggtcaacgagtcagccagtctccgagagcggattgagttcctcaatgaggcctcggtcatgaagggcttcacctgccatcacgtggtgcgcctcctgggagtggtgtccaagggccagcccacgctggtggtgatggagctgatggctcacggagacctgaagagctacctccgttctctgcggccagaggctgagaataatcctggccgccctccccctacccttcaagagatgattcagatggcggcagagattgctgacgggatggcctacctgaacgccaagaagtttgtgcatcgggacctggcagcgagaaactgcatggtcgcccatgattttactgtcaaaattggagactttggaatgaccagagacatctatgaaacggattactaccggaaagggggcaagggtctgctccctgtacggtggatggcaccggagtccctgaaggatggggtcttcaccacttcttctgacatgtggtcctttggcgtggtcctttgggaaatcaccagcttggcagaacagccttaccaaggcctgtctaatgaacaggtgttgaaatttgtcatggatggagggtatctggatcaacccgacaactgtccagagagagtcactgacctcatgcgcatgtgctggcaattcaaccccaacatgaggccaaccttcctggagattgtcaacctgctcaaggacgacctgcaccccagctttccagaggtgtcgttcttccacagcgaggagaacaaggctcccgagagtgaggagctggagatggagtttgaggacatggagaatgtgcccctggaccgttcctcgcactgtcagagggaggaggcggggggccgggatggagggtcctcgctgggtttcaagcggagctacgaggaacacatcccttacacacacatgaacggaggcaagaaaaacgggcggattctgaccttgcctcggtccaatccttcctgggcccgggatccaccggtcgccaccgtgagcaagggcgaggagaataatatggccatcatcaaggagttcatgcgcttcaaggtgcgcatggagggcaccgtgaacggccacgagttcgagatcgagggcgagggcgagggccgcccctacgagggctttcagaccgctaagctgaaggtgaccaagggcggccccctgcccttcgcctgggacatcctgtcccctctcttcacctacggctccaaggcctacgtgaagcaccccgccgacatccccgactacttcaagctgtccttccccgagggcttcaagtgggagcgcgtgatgaactacgaggacggcggcgtggtgaccgtgacccaggactcctcactgcaggacggcgagttcatctacaaggtgaagatgcgcggcaccaacttcccctccgacggccccgtgatgcagaagaagaccatgggctgggaggcctcctccgagcggatgtaccccgaggacggcgccctgaagggcgagatcaggatgaggctgaagctgaaggacggcggccactacacctccgaggtcaagaccacctacaaggccaagaagtccgtgcagctgcccggcgcctacatcgtcggcatcaagctggacatcacctcccacaacgaggactacaccatcgtggaacagtacgaacgcgccgagggccgccactccaccggcggcatggacgagctgtacaagtaaagcggccgcgactctagatcataatcagcacatgaggatcacccatgtctgcaggtcgactctagaaaacatgaggatcacccatgt

SEQ ID NO: 212 - protein, 1614 aa, Artificial Sequence
  Description of Artificial Sequence: Synthetic polypeptide
  INSR676TAG-mOrange-MS2
  MOD_RES (676)..(676): Any non-canonical amino acid
MGTGGRRGAAAAPLLVAVAALLLGAAGHLYPGEVCPGMDIRNNLTRLHELENCSVIEGHLQILLMFKTRPEDFRDLSFPKLIMITDYLLLFRVYGLESLKDLFPNLTVIRGSRLFFNYALVIFEMVHLKELGLYNLMNITRGSVRIEKNNELCYLATIDWSRILDSVEDNYIVLNKDDNEECGDICPGTAKGKTNCPATVINGQFVERCWTHSHCQKVCPTICKSHGCTAEGLCCHSECLGNCSQPDDPTKCVACRNFYLDGRCVETCPPPYYHFQDWRCVNFSFCQDLHHKCKNSRRQGCHQYVIHNNKCIPECPSGYTMNSSNLLCTPCLGPCPKVCHLLEGEKTIDSVTSAQELRGCTVINGSLIINIRGGNNLAAELEANLGLIEEISGYLKIRRSYALVSLSFFRKLRLIRGETLEIGNYSFYALDNQNLRQLWDWSKHNLTITQGKLFFHYNPKLCLSEIHKMEEVSGTKGRQERNDIALKTNGDQASCENELLKFSYIRTSFDKILLRWEPYWPPDFRDLLGFMLFYKEAPYQNVTEFDGQDACGSNSWTVVDIDPPLRSNDPKSQNHPGWLMRGLKPWTQYAIFVKTLVTFSDERRTYGAKSDIIYVQTDATNPSVPLDPISVSNSSSQIILKWKPPSDPNGNITHYLVFWERQAEDSELFELDYCLXGLKLPSRTWSPPFESEDSQKHNQSEYEDSAGECCSCPKTDSQILKELEESSFRKTFEDYLHNVVFVPRPSRKRRSLGDVGNVTVAVPTVAAFPNTSSTSVPTSPEEHRPFEKVVNKESLVISGLRHFTGYRIELQACNQDTPEERCSVAAYVSARTMPEAKADDIVGPVTHEIFENNVVHLMWQEPKEPNGLIVLYEVSYRRYGDEELHLCVSRKHFALERGCRLRGLSPGNYSVRIRATSLAGNGSWTEPTYFYVTDYLDVPSNIAKIIIGPLIFVFLFSVVIGSIYLFLRKRQPDGPLGPLYASSNPEYLSASDVFPCSVYVPDEWEVSREKITLLRELGQGSFGMVYEGNARDIIKGEAETRVAVKTVNESASLRERIEFLNEASVMKGFTCHHVVRLLGVVSKGQPTLVVMELMAHGDLKSYLRSLRPEAENNPGRPPPTLQEMIQMAAEIADGMAYLNAKKFVHRDLAARNCMVAHDFTVKIGDFGMTRDIYETDYYRKGGKGLLPVRWMAPESLKDGVFTTSSDMWSFGVVLWEITSLAEQPYQGLSNEQVLKFVMDGGYLDQPDNCPERVTDLMRMCWQFNPNMRPTFLEIVNLLKDDLHPSFPEVSFFHSEENKAPESEELEMEFEDMENVPLDRSSHCQREEAGGRDGGSSLGFKRSYEEHIPYTHMNGGKKNGRILTLPRSNPSWARDPPVATVSKGEENNMAIIKEFMRFKVRMEGTVNGHEFEIEGEGEGRPYEGFQTAKLKVTKGGPLPFAWDILSPLFTYGSKAYVKHPADIPDYFKLSFPEGFKWERVMNYEDGGVVTVTQDSSLQDGEFIYKVKMRGTNFPSDGPVMQKKTMGWEASSERMYPEDGALKGEIRMRLKLKDGGHYTSEVKTTYKAKKSVQLPGAYIVGIKLDITSHNEDYTIVEQYERAEGRHSTGGMDELYK

SEQ ID NO: 213 - DNA, 5171 bp, Artificial Sequence
  Description of Artificial Sequence: Synthetic polynucleotide
  INSR 676TAG-iRFP-MS2
atgggcaccgggggccggcggggggcggcggccgcgccgctgctggtggcggtggccgcgctgctactgggcgccgcgggccacctgtaccccggagaggtgtgtcccggcatggatatccggaacaacctcactaggttgcatgagctggagaattgctctgtcatcgaaggacacttgcagatactcttgatgttcaaaacgaggcccgaagatttccgagacctcagtttccccaaactcatcatgatcactgattacttgctgctcttccgggtctatgggctcgagagcctgaaggacctgttccccaacctcacggtcatccggggatcacgactgttctttaactacgcgctggtcatcttcgagatggttcacctcaaggaactcggcctctacaacctgatgaacatcacccggggttctgtccgcatcgagaagaacaatgagctctgttacttggccactatcgactggtcccgtatcctggattccgtggaggataattacatcgtgttgaacaaagatgacaacgaggagtgtggagacatctgtccgggtaccgcgaagggcaagaccaactgccccgccaccgtcatcaacgggcagtttgtcgaacgatgttggactcatagtcactgccagaaagtttgcccgaccatctgtaagtcacacggctgcaccgccgaaggcctctgttgccacagcgagtgcctgggcaactgttctcagcccgacgaccccaccaagtgcgtggcctgccgcaacttctacctggatggcaggtgtgtggagacctgcccgcccccgtactaccacttccaggactggcgctgtgtgaacttcagcttctgccaggacctgcaccacaaatgcaagaactcgcggaggcagggctgccaccagtacgtcattcacaacaacaagtgcatccctgagtgtccctccgggtacacgatgaattccagcaacttgctgtgcaccccatgcctgggtccctgtcccaaggtgtgccacctcctagaaggcgagaagaccatcgactcggtgacgtctgcccaggagctccgaggatgcaccgtcatcaacgggagtctgatcatcaacattcgaggaggcaacaatctggcagctgagctagaagccaacctcggcctcattgaagaaatttcagggtatctaaaaatccgccgatcctacgctctggtgtcactttccttcttccggaagttacgtctgattcgaggagagaccttggaaattgggaactactccttctatgccttggacaaccagaacctaaggcagctctgggactggagcaaacacaacctcaccatcactcaggggaaactcttcttccactataaccccaaactctgcttgtcagaaatccacaagatggaagaagtttcaggaaccaaggggcgccaggagagaaacgacattgccctgaagaccaatggggaccaggcatcctgtgaaaatgagttacttaaattttcttacattcggacatcttttgacaagatcttgctgagatgggagccgtactggccccccgacttccgagacctcttggggttcatgctgttctacaaagaggccccttatcagaatgtgacggagttcgacgggcaggatgcatgtggttccaacagttggacggtggtagacattgacccacccctgaggtccaacgaccccaaatcacagaaccacccagggtggctgatgcggggtctcaagccctggacccagtatgccatctttgtgaagaccctggtcaccttttcggatgaacgccggacctatggggccaagagtgacatcatttatgtccagacagatgccaccaacccctctgtgcccctggatccaatctcagtgtctaactcatcatcccagattattctgaagtggaaaccaccctccgaccccaatggcaacatcacccactacctggttttctgggagaggcaggcggaagacagtgagctgttcgagctggattattgcctctaggggctgaagctgccctcgaggacctggtctccaccattcgagtctgaagattctcagaagcacaaccagagtgagtatgaggattcggccggcgaatgctgctcctgtccaaagacagactctcagatcctgaaggagctggaggagtcctcgtttaggaagacgtttgaggattacctgcacaacgtggttttcgtccccaggccatctcggaaacgcaggtcccttggcgatgttgggaatgtgacggtggccgtgcccacggtggcagctttccccaacacttcctcgaccagcgtgcccacgagtccggaggagcacaggccttttgagaaggtggtgaacaaggagtcgctggtcatctccggcttgcgacacttcacgggctatcgcatcgagctgcaggcttgcaaccaggacacccctgaggaacggtgcagtgtggcagcctacgtcagtgcgaggaccatgcctgaagccaaggctgatgacattgttggccctgtgacgcatgaaatctttgagaacaacgtcgtccacttgatgtggcaggagccgaaggagcccaatggtctgatcgtgctgtatgaagtgagttatcggcgatatggtgatgaggagctgcatctctgcgtctcccgcaagcacttcgctctggaacggggctgcaggctgcgtgggctgtcaccggggaactacagcgtgcgaatccgggccacctcccttgcgggcaacggctcttggacggaacccacctatttctacgtgacagactatttagacgtcccgtcaaatattgcaaaaattatcatcggccccctcatctttgtctttctcttcagtgttgtgattggaagtatttatctattcctgagaaagaggcagccagatgggccgctgggaccgctttacgcttcttcaaaccctgagtatctcagtgccagtgatgtgtttccatgctctgtgtacgtgccggacgagtgggaggtgtctcgagagaagatcaccctccttcgagagctggggcagggctccttcggcatggtgtatgagggcaatgccagggacatcatcaagggtgaggcagagacccgcgtggcggtgaagacggtcaacgagtcagccagtctccgagagcggattgagttcctcaatgaggcctcggtcatgaagggcttcacctgccatcacgtggtgcgcctcctgggagtggtgtccaagggccagcccacgctggtggtgatggagctgatggctcacggagacctgaagagctacctccgttctctgcggccagaggctgagaataatcctggccgccctccccctacccttcaagagatgattcagatggcggcagagattgctgacgggatggcctacctgaacgccaagaagtttgtgcatcgggacctggcagcgagaaactgcatggtcgcccatgattttactgtcaaaattggagactttggaatgaccagagacatctatgaaacggattactaccggaaagggggcaagggtctgctccctgtacggtggatggcaccggagtccctgaaggatggggtcttcaccacttcttctgacatgtggtcctttggcgtggtcctttgggaaatcaccagcttggcagaacagccttaccaaggcctgtctaatgaacaggtgttgaaatttgtcatggatggagggtatctggatcaacccgacaactgtccagagagagtcactgacctcatgcgcatgtgctggcaattcaaccccaacatgaggccaaccttcctggagattgtcaacctgctcaaggacgacctgcaccccagctttccagaggtgtcgttcttccacagcgaggagaacaaggctcccgagagtgaggagctggagatggagtttgaggacatggagaatgtgcccctggaccgttcctcgcactgtcagagggaggaggcggggggccgggatggagggtcctcgctgggtttcaagcggagctacgaggaacacatcccttacacacacatgaacggaggcaagaaaaacgggcggattctgaccttgcctcggtccaatccttcctgggcccgggatccaccggtcgccaccgcggaaggatccgtcgccaggcagcctgacctcttgacctgcgacgatgagccgatccatatccccggtgccatccaaccgcatggactgctgctcgccctcgccgccgacatgacgatcgttgccggcagcgacaaccttcccgaactcaccggactggcgatcggcgccctgatcggccgctctgcggccgatgtcttcgactcggagacgcacaaccgtctgacgatcgccttggccgagcccggggcggccgtcggagcaccgatcactgtcggcttcacgatgcgaaaggacgcaggcttcatcggctcctggcatcgccatgatcagctcatcttcctcgagctcgagcctccccagcgggacgtcgccgagccgcaggcgttcttccgccgcaccaacagcgccatccgccgcctgcaggccgccgaaaccttggaaagcgcctgcgccgccgcggcgcaagaggtgcggaagattaccggcttcgatcgggtgatgatctatcgcttcgcctccgacttcagcggcgaagtgatcgcagaggatcggtgcgccgaggtcgagtcaaaactaggcctgcactatcctgcctcaaccgtgccggcgcaggcccgtcggctctataccatcaacccggtacggatcattcccgatatcaattatcggccggtgccggtcaccccagacctcaatccggtcaccgggcggccgattgatcttagcttcgccatcctgcgcagcgtctcgcccgtccatctggaattcatgcgcaacataggcatgcacggcacgatgtcgatctcgattttgcgcggcgagcgactgtggggattgatcgtttgccatcaccgaacgccgtactacgtcgatctcgatggccgccaagcctgcgagctagtcgcccaggttctggcctggcagatcggcgtgatggaagagtaagcggccgcgactctagatcataatcagcacatgaggatcacccatgtctgcaggtcgactctagaaaacatgaggatcacccatgt

SEQ ID NO: 214 - protein, 1694 aa, Artificial Sequence
  Description of Artificial Sequence: Synthetic polypeptide
  INSR 676TAG-iRFP-MS2
  MOD_RES (676)..(676): Any non-canonical amino acid
MGTGGRRGAAAAPLLVAVAALLLGAAGHLYPGEVCPGMDIRNNLTRLHELENCSVIEGHLQILLMFKTRPEDFRDLSFPKLIMITDYLLLFRVYGLESLKDLFPNLTVIRGSRLFFNYALVIFEMVHLKELGLYNLMNITRGSVRIEKNNELCYLATIDWSRILDSVEDNYIVLNKDDNEECGDICPGTAKGKTNCPATVINGQFVERCWTHSHCQKVCPTICKSHGCTAEGLCCHSECLGNCSQPDDPTKCVACRNFYLDGRCVETCPPPYYHFQDWRCVNFSFCQDLHHKCKNSRRQGCHQYVIHNNKCIPECPSGYTMNSSNLLCTPCLGPCPKVCHLLEGEKTIDSVTSAQELRGCTVINGSLIINIRGGNNLAAELEANLGLIEEISGYLKIRRSYALVSLSFFRKLRLIRGETLEIGNYSFYALDNQNLRQLWDWSKHNLTITQGKLFFHYNPKLCLSEIHKMEEVSGTKGRQERNDIALKTNGDQASCENELLKFSYIRTSFDKILLRWEPYWPPDFRDLLGFMLFYKEAPYQNVTEFDGQDACGSNSWTVVDIDPPLRSNDPKSQNHPGWLMRGLKPWTQYAIFVKTLVTFSDERRTYGAKSDIIYVQTDATNPSVPLDPISVSNSSSQIILKWKPPSDPNGNITHYLVFWERQAEDSELFELDYCLXGLKLPSRTWSPPFESEDSQKHNQSEYEDSAGECCSCPKTDSQILKELEESSFRKTFEDYLHNVVFVPRPSRKRRSLGDVGNVTVAVPTVAAFPNTSSTSVPTSPEEHRPFEKVVNKESLVISGLRHFTGYRIELQACNQDTPEERCSVAAYVSARTMPEAKADDIVGPVTHEIFENNVVHLMWQEPKEPNGLIVLYEVSYRRYGDEELHLCVSRKHFALERGCRLRGLSPGNYSVRIRATSLAGNGSWTEPTYFYVTDYLDVPSNIAKIIIGPLIFVFLFSVVIGSIYLFLRKRQPDGPLGPLYASSNPEYLSASDVFPCSVYVPDEWEVSREKITLLRELGQGSFGMVYEGNARDIIKGEAETRVAVKTVNESASLRERIEFLNEASVMKGFTCHHVVRLLGVVSKGQPTLVVMELMAHGDLKSYLRSLRPEAENNPGRPPPTLQEMIQMAAEIADGMAYLNAKKFVHRDLAARNCMVAHDFTVKIGDFGMTRDIYETDYYRKGGKGLLPVRWMAPESLKDGVFTTSSDMWSFGVVLWEITSLAEQPYQGLSNEQVLKFVMDGGYLDQPDNCPERVTDLMRMCWQFNPNMRPTFLEIVNLLKDDLHPSFPEVSFFHSEENKAPESEELEMEFEDMENVPLDRSSHCQREEAGGRDGGSSLGFKRSYEEHIPYTHMNGGKKNGRILTLPRSNPSWARDPPVATAEGSVARQPDLLTCDDEPIHIPGAIQPHGLLLALAADMTIVAGSDNLPELTGLAIGALIGRSAADVFDSETHNRLTIALAEPGAAVGAPITVGFTMRKDAGFIGSWHRHDQLIFLELEPPQRDVAEPQAFFRRTNSAIRRLQAAETLESACAAAAQEVRKITGFDRVMIYRFASDFSGEVIAEDRCAEVESKLGLHYPASTVPAQARRLYTINPVRIIPDINYRPVPVTPDLNPVTGRPIDLSFAILRSVSPVHLEFMRNIGMHGTMSISILRGERLWGLIVCHHRTPYYVDLDGRQACELVAQVLAWQIGVMEE

SEQ ID NO: 215 - DNA, 883 bp, Artificial Sequence
  Description of Artificial Sequence: Synthetic polynucleotide
  mCherry 2xpp7
atgggccgcctggaaagcaccccgccgaaaaaaaaacgcaaagtggaagatagcgcgagcgtgagcaagggcgaggaggataacatggccatcatcaaggagttcatgcgcttcaaggtgcacatggagggctccgtgaacggccacgagttcgagatcgagggcgagggcgagggccgcccctacgagggcacccagaccgccaagctgaaggtgaccaagggtggccccctgcccttcgcctgggacatcctgtcccctcagttcatgtacggctccaaggcctacgtgaagcaccccgccgacatccccgactacttgaagctgtccttccccgagggcttcaagtgggagcgcgtgatgaacttcgaggacggcggcgtggtgaccgtgacccaggactcctccctgcaggacggcgagttcatctacaaggtgaagctgcgcggcaccaacttcccctccgacggccccgtaatgcagaagaagacgatgggctgggaggcctcctccgagcggatgtaccccgaggacggcgccctgaagggcgagatcaagcagaggctgaagctgaaggacggcggccactacgacgctgaggtcaagaccacctacaaggccaagtagcccgtgcagctgcccggcgcctacaacgtcaacatcaagttggacatcacctcccacaacgaggactacaccatcgtggaacagtacgaacgcgccgagggccgccactccaccggcggcatggacgagctgtacaagcatcatcatcatcatcattaaagatcctaaggtacaattgcctagaaaggagcagacgatatggcgtcgctccctgcaggtcgactctagaaaccagcagagcatatgggctcgctgg

SEQ ID NO: 216 - protein, 261 aa, Artificial Sequence; identical to SEQ ID NO: 180
  Description of Artificial Sequence: Synthetic polypeptide
  mCherry 2xpp7
  MOD_RES (209)..(209): Any naturally occurring amino acid

SEQ ID NO: 217 - DNA, 974 bp, Artificial Sequence
  Description of Artificial Sequence: Synthetic polynucleotide
  mCherry 4xpp7
atgggccgcctggaaagcaccccgccgaaaaaaaaacgcaaagtggaagatagcgcgagcgtgagcaagggcgaggaggataacatggccatcatcaaggagttcatgcgcttcaaggtgcacatggagggctccgtgaacggccacgagttcgagatcgagggcgagggcgagggccgcccctacgagggcacccagaccgccaagctgaaggtgaccaagggtggccccctgcccttcgcctgggacatcctgtcccctcagttcatgtacggctccaaggcctacgtgaagcaccccgccgacatccccgactacttgaagctgtccttccccgagggcttcaagtgggagcgcgtgatgaacttcgaggacggcggcgtggtgaccgtgacccaggactcctccctgcaggacggcgagttcatctacaaggtgaagctgcgcggcaccaacttcccctccgacggccccgtaatgcagaagaagacgatgggctgggaggcctcctccgagcggatgtaccccgaggacggcgccctgaagggcgagatcaagcagaggctgaagctgaaggacggcggccactacgacgctgaggtcaagaccacctacaaggccaagtagcccgtgcagctgcccggcgcctacaacgtcaacatcaagttggacatcacctcccacaacgaggactacaccatcgtggaacagtacgaacgcgccgagggccgccactccaccggcggcatggacgagctgtacaagcatcatcatcatcatcattaaagatcctaaggtacaattgcctagaaaggagcagacgatatggcgtcgctccctgcaggtcgactctagaaaccagcagagcatatgggctcgctggctgggtacaattgcctagaaaggagcagacgatatggcgtcgctccctgcaggtcgactctagaaaccagcagagcatatgggctcgctgg

SEQ ID NO: 218 - protein, 261 aa, Artificial Sequence; identical to SEQ ID NO: 180
  Description of Artificial Sequence: Synthetic polypeptide
  mCherry 4xpp7
  MOD_RES (209)..(209): Any naturally occurring amino acid

SEQ ID NO: 219 - DNA, 1065 bp, Artificial Sequence
  Description of Artificial Sequence: Synthetic polynucleotide
  mCherry  6xpp7
atgggccgcctggaaagcaccccgccgaaaaaaaaacgcaaagtggaagatagcgcgagcgtgagcaagggcgaggaggataacatggccatcatcaaggagttcatgcgcttcaaggtgcacatggagggctccgtgaacggccacgagttcgagatcgagggcgagggcgagggccgcccctacgagggcacccagaccgccaagctgaaggtgaccaagggtggccccctgcccttcgcctgggacatcctgtcccctcagttcatgtacggctccaaggcctacgtgaagcaccccgccgacatccccgactacttgaagctgtccttccccgagggcttcaagtgggagcgcgtgatgaacttcgaggacggcggcgtggtgaccgtgacccaggactcctccctgcaggacggcgagttcatctacaaggtgaagctgcgcggcaccaacttcccctccgacggccccgtaatgcagaagaagacgatgggctgggaggcctcctccgagcggatgtaccccgaggacggcgccctgaagggcgagatcaagcagaggctgaagctgaaggacggcggccactacgacgctgaggtcaagaccacctacaaggccaagtagcccgtgcagctgcccggcgcctacaacgtcaacatcaagttggacatcacctcccacaacgaggactacaccatcgtggaacagtacgaacgcgccgagggccgccactccaccggcggcatggacgagctgtacaagcatcatcatcatcatcattaaagatcctaaggtacaattgcctagaaaggagcagacgatatggcgtcgctccctgcaggtcgactctagaaaccagcagagcatatgggctcgctggctgggtacaattgcctagaaaggagcagacgatatggcgtcgctccctgcaggtcgactctagaaaccagcagagcatatgggctcgctggctgggtacaattgcctagaaaggagcagacgatatggcgtcgctccctgcaggtcgactctagaaaccagcagagcatatgggctcgctgg

SEQ ID NO: 220 - protein, 261 aa, Artificial Sequence; identical to SEQ ID NO: 180
  Description of Artificial Sequence: Synthetic polypeptide
  mCherry 6xpp7
  MOD_RES (209)..(209): Any naturally occurring amino acid

SEQ ID NO: 221 - DNA, 1225 bp, Artificial Sequence
  Description of Artificial Sequence: Synthetic polynucleotide
  mCherry fusion protein 2xms2
atgccagagccagcgaagtctgctcccgccccgaaaaagggctccaagaaggcggtgactaaggcgcagaagaaaggcggcaagaagcgcaagcgcagccgcaaggagagctattccatctatgtgtacaaggttctgaagcaggtccaccctgacaccggcatttcgtccaaggccatgggcatcatgaattcgtttgtgaacgacattttcgagcgcatcgcaggtgaggcttcccgcctggcgcattacaacaagcgctcgaccatcacctccagggagatccagacggccgtgcgcctgctgctgcctggggagttggccaagcacgccgtgtccgagggtactaaggccatcaccaagtacaccagcgctaaggatccaccggtcgccaccatggtgagcaagggcgaggaggataacatggccatcatcaaggagttcatgcgcttcaaggtgcacatggagggctccgtgaacggccacgagttcgagatcgagggcgagggcgagggccgcccctacgagggcacccagaccgccaagctgaaggtgaccaagggtggccccctgcccttcgcctgggacatcctgtcccctcagttcatgtacggctccaaggcctacgtgaagcaccccgccgacatccccgactacttgaagctgtccttccccgagggcttcaagtgggagcgcgtgatgaacttcgaggacggcggcgtggtgaccgtgacccaggactcctccctgcaggacggcgagttcatctacaaggtgaagctgcgcggcaccaacttcccctccgacggccccgtaatgcagaagaagacgatgggctgggaggcctcctccgagcggatgtaccccgaggacggcgccctgaagggcgagatcaagcagaggctgaagctgaaggacggcggccactacgacgctgaggtcaagaccacctacaaggccaagtagcccgtgcagctgcccggcgcctacaacgtcaacatcaagttggacatcacctcccacaacgaggactacaccatcgtggaacagtacgaacgcgccgagggccgccactccaccggcggcatggacgagctgtacaagcatcatcatcatcatcattaagggcccagatctcctgaggctgcagcctactagtcctagaaaacatgaggatcacccatgtctgcacctcgacactagaaaacatgaggatcacccatgt

SEQ ID NO: 222 - protein, 374 aa, Artificial Sequence
  Description of Artificial Sequence: Synthetic polypeptide
  mCherry fusion protein 2xms2
  MOD_RES (322)..(322): Any naturally occurring amino acid
MPEPAKSAPAPKKGSKKAVTKAQKKGGKKRKRSRKESYSIYVYKVLKQVHPDTGISSKAMGIMNSFVNDIFERIAGEASRLAHYNKRSTITSREIQTAVRLLLPGELAKHAVSEGTKAITKYTSAKDPPVATMVSKGEEDNMAIIKEFMRFKVHMEGSVNGHEFEIEGEGEGRPYEGTQTAKLKVTKGGPLPFAWDILSPQFMYGSKAYVKHPADIPDYLKLSFPEGFKWERVMNFEDGGVVTVTQDSSLQDGEFIYKVKLRGTNFPSDGPVMQKKTMGWEASSERMYPEDGALKGEIKQRLKLKDGGHYDAEVKTTYKAKXPVQLPGAYNVNIKLDITSHNEDYTIVEQYERAEGRHSTGGMDELYKHHHHHH

SEQ ID NO: 223 - DNA, 1362 bp, Artificial Sequence
  Description of Artificial Sequence: Synthetic polynucleotide
  IFRS1
gacaaaaaaccgctgaataccctgatctctgctactggtctgtggatgagtcgtaccggaaccattcataaaatcaaacaccacgaggttagccgttcgaaaatctatattgagatggcgtgtggcgatcatctggttgtgaacaatagccgctcttctcgtacagcacgtgcactgcgtcaccacaaatatcgtaaaacctgtaaacgttgccgtgtgtccgatgaggatctgaacaaattcctgacaaaagccaatgaggaccaaacaagcgtgaaagtgaaagtcgttagcgctcctacccgtactaaaaaagcaatgccgaaatccgttgctcgtgcccctaaaccactggaaaacactgaagcagcacaggcacagccgtctggaagcaaattctctccggccattcctgtttctacccaggagtccgtttctgttccagcaagtgtgagcaccagcattagcagtattagcaccggtgccaccgctagcgccctggttaaaggcaataccaatccgattacaagcatgtctgccccggttcaagcatcagctccagcactgacaaaatcccaaaccgatcgtctggaggttctgctgaatccgaaagacgaaatcagcctgaattccggcaaaccgtttcgtgaactggagagcgaactgctgtcacgtcgtaaaaaagacctgcaacaaatctatgccgaagaacgtgagaactatctggggaaactggaacgtgaaatcacccgctttttcgtggatcgtggctttctggagatcaaatccccgattctgattcctctggagtatatcgagcgtatgggcatcgacaatgataccgaactgagcaaacaaattttccgtgtggataaaaacttctgtctgcgccctatgcttgcaccaaatatgctgaactatagccgcaaactggaccgtgccctgcctgatcctatcaaaatcttcgagatcggcccgtgttatcgtaaagagtccgacggtaaagaacatctggaggagtttaccatgctgtcttttatgcaaatgggttcaggttgtactcgtgagaacctggaaagcatcatcaccgattttctgaaccacctgggcattgacttcaaaattgtgggcgacagctgtatggtgtatggcgacaccctggatgtcatgcacggcgacctggaactgtctagtgccgttgttggaccaattccgctggaccgtgagtggggtatcgacaaaccgtggatcggagcaggattcggtctggaacgcctgctgaaagtgaaacacgacttcaaaaacatcaaacgtgccgcccgttctgaatcgtattataacgggatctctacgaacctgtaa

SEQ ID NO: 224 - protein, 453 aa, Artificial Sequence
  Description of Artificial Sequence: Synthetic polypeptide
  IFRS1
DKKPLNTLISATGLWMSRTGTIHKIKHHEVSRSKIYIEMACGDHLVVNNSRSSRTARALRHHKYRKTCKRCRVSDEDLNKFLTKANEDQTSVKVKVVSAPTRTKKAMPKSVARAPKPLENTEAAQAQPSGSKFSPAIPVSTQESVSVPASVSTSISSISTGATASALVKGNTNPITSMSAPVQASAPALTKSQTDRLEVLLNPKDEISLNSGKPFRELESELLSRRKKDLQQIYAEERENYLGKLEREITRFFVDRGFLEIKSPILIPLEYIERMGIDNDTELSKQIFRVDKNFCLRPMLAPNMLNYSRKLDRALPDPIKIFEIGPCYRKESDGKEHLEEFTMLSFMQMGSGCTRENLESIITDFLNHLGIDFKIVGDSCMVYGDTLDVMHGDLELSSAVVGPIPLDREWGIDKPWIGAGFGLERLLKVKHDFKNIKRAARSESYYNGISTNL

SEQ ID NO: 225 - DNA, 1362 bp, Artificial Sequence
  Description of Artificial Sequence: Synthetic polynucleotide
  CbzRS
gacaaaaaaccgctgaataccctgatctctgctactggtctgtggatgagtcgtaccggaaccattcataaaatcaaacaccacgaggttagccgttcgaaaatctatattgagatggcgtgtggcgatcatctggttgtgaacaatagccgctcttctcgtacagcacgtgcactgcgtcaccacaaatatcgtaaaacctgtaaacgttgccgtgtgtccgatgaggatctgaacaaattcctgacaaaagccaatgaggaccaaacaagcgtgaaagtgaaagtcgttagcgctcctacccgtactaaaaaagcaatgccgaaatccgttgctcgtgcccctaaaccactggaaaacactgaagcagcacaggcacagccgtctggaagcaaattctctccggccattcctgtttctacccaggagtccgtttctgttccagcaagtgtgagcaccagcattagcagtattagcaccggtgccaccgctagcgccctggttaaaggcaataccaatccgattacaagcatgtctgccccggttcaagcatcagctccagcactgacaaaatcccaaaccgatcgtctggaggttctgctgaatccgaaagacgaaatcagcctgaattccggcaaaccgtttcgtgaactggagagcgaactgctgtcacgtcgtaaaaaagacctgcaacaaatctatgccgaagaacgtgagaactatctggggaaactggaacgtgaaatcacccgctttttcgtggatcgtggctttctggagatcaaatccccgattctgattcctctggagtatatcgagcgtatgggcatcgacaatgataccgaactgagcaaacaaattttccgtgtggataaaaacttctgtctgcgccctatgcttgcaccaaatctgatgaactatggacgcaaactggaccgtgccctgcctgatcctatcaaaatcttcgagatcggcccgtgttatcgtaaagagtccgacggtaaagaacatctggaggagtttaccatgctgaactttacacaaatgggttcaggttgtactcgtgagaacctggaaagcatcatcaccgattttctgaaccacctgggcattgacttcaaaattgtgggcgacagctgtatggtgtatggcgacaccctggatgtcatgcacggcgacctggaactgtctagtgccgttgttggaccaattccgctggaccgtgagtggggtatcgacaaaccgtggatcggagcaggattcggtctggaacgcctgctgaaagtgaaacacgacttcaaaaacatcaaacgtgccgcccgttctgaatcgtattataacgggatctctacgaacctgtaa

SEQ ID NO: 226 - protein, 453 aa, Artificial Sequence
  Description of Artificial Sequence: Synthetic polypeptide
  CbzRS
DKKPLNTLISATGLWMSRTGTIHKIKHHEVSRSKIYIEMACGDHLVVNNSRSSRTARALRHHKYRKTCKRCRVSDEDLNKFLTKANEDQTSVKVKVVSAPTRTKKAMPKSVARAPKPLENTEAAQAQPSGSKFSPAIPVSTQESVSVPASVSTSISSISTGATASALVKGNTNPITSMSAPVQASAPALTKSQTDRLEVLLNPKDEISLNSGKPFRELESELLSRRKKDLQQIYAEERENYLGKLEREITRFFVDRGFLEIKSPILIPLEYIERMGIDNDTELSKQIFRVDKNFCLRPMLAPNLMNYGRKLDRALPDPIKIFEIGPCYRKESDGKEHLEEFTMLNFTQMGSGCTRENLESIITDFLNHLGIDFKIVGDSCMVYGDTLDVMHGDLELSSAVVGPIPLDREWGIDKPWIGAGFGLERLLKVKHDFKNIKRAARSESYYNGISTNL

SEQ ID NO: 227 - DNA, 1362 bp, Artificial Sequence
  Description of Artificial Sequence: Synthetic polynucleotide
  CpkRS
gataaaaaaccgctgaataccctgatctctgctactggtctgtggatgagtcgtaccggaaccattcataaaatcaaacaccacgaggttagccgttcgaaaatctatattgagatggcgtgtggcgatcatctggttgtgaacaatagccgctcttctcgtacagcacgtgcactgcgtcaccacaaatatcgtaaaacctgtaaacgttgccgtgtgtccgatgaggatctgaacaaattcctgacaaaagccaatgaggaccaaacaagcgtgaaagtgaaagtcgttagcgctcctacccgtactaaaaaagcaatgccgaaatccgttgctcgtgcccctaaaccactggaaaacactgaagcagcacaggcacagccgtctggaagcaaattctctccggccattcctgtttctacccaggagtccgtttctgttccagcaagtgtgagcaccagcattagcagtattagcaccggtgccaccgctagcgccctggttaaaggcaataccaatccgattacaagcatgtctgccccggttcaagcatcagctccagcactgacaaaatcccaaaccgatcgtctggaggttctgctgaatccgaaagacgaaatcagcctgaattccggcaaaccgtttcgtgaactggagagcgaactgctgtcacgtcgtaaaaaagacctgcaacaaatctatgccgaagaacgtgagaactatctggggaaactggaacgtgaaatcacccgctttttcgtggatcgtggctttctggagatcaaatccccgattctgattcctctggagtatatcgagcgtatgggcatcgacaatgataccgaactgagcaaacaaattttccgtgtggataaaaacttctgtctgcgccctatgctttcaccaaatctgtataactatctgcgcaaactggaccgtgccctgcctgatcctatcaaaatcttcgagatcggcccgtgttatcgtaaagagtccgacggtaaagaacatctggaggagtttaccatgctgaacttttgccaaatgggttcaggttgtactcgtgagaacctggaaagcatcatcaccgattttctgaaccacctgggcattgacttcaaaattgtgggcgacagctgtatggtgtatggcgacaccctggatgtcatgcacggcgacctggaactgtctagtgccgttgttggaccaattccgctggaccgtgagtggggtatcgacaaaccgtggatcggagcaggattcggtctggaacgcctgctgaaagtgaaacacgacttcaaaaacatcaaacgtgccgcccgttctgaatcgtattataacgggatctctacgaacctgtaa

SEQ ID NO: 228 - protein, 453 aa, Artificial Sequence
  Description of Artificial Sequence: Synthetic polypeptide
  CpkRS
DKKPLNTLISATGLWMSRTGTIHKIKHHEVSRSKIYIEMACGDHLVVNNSRSSRTARALRHHKYRKTCKRCRVSDEDLNKFLTKANEDQTSVKVKVVSAPTRTKKAMPKSVARAPKPLENTEAAQAQPSGSKFSPAIPVSTQESVSVPASVSTSISSISTGATASALVKGNTNPITSMSAPVQASAPALTKSQTDRLEVLLNPKDEISLNSGKPFRELESELLSRRKKDLQQIYAEERENYLGKLEREITRFFVDRGFLEIKSPILIPLEYIERMGIDNDTELSKQIFRVDKNFCLRPMLSPNLYNYLRKLDRALPDPIKIFEIGPCYRKESDGKEHLEEFTMLNFCQMGSGCTRENLESIITDFLNHLGIDFKIVGDSCMVYGDTLDVMHGDLELSSAVVGPIPLDREWGIDKPWIGAGFGLERLLKVKHDFKNIKRAARSESYYNGISTNL

SEQ ID NO: 229 - DNA, 69 bp, Artificial Sequence
  Description of Artificial Sequence: Synthetic oligonucleotide
  tRNApyl, CGA
ggaaacctgatcatgtagatcgaatggactcgaaatccgttcagccgggttagattcccggggtttccg

SEQ ID NO: 230 - DNA, 69 bp, Artificial Sequence
  Description of Artificial Sequence: Synthetic oligonucleotide
  tRNApyl, CGG
ggaaacctgatcatgtagatcgaatggactcggaatccgttcagccgggttagattcccggggtttccg

SEQ ID NO: 231 - DNA, 69 bp, Artificial Sequence
  Description of Artificial Sequence: Synthetic oligonucleotide
  tRNApyl, UAA
ggaaacctgatcatgtagatcgaatggacttaaaatccgttcagccgggttagattcccggggtttccg

SEQ ID NO: 232 - DNA, 69 bp, Artificial Sequence
  Description of Artificial Sequence: Synthetic oligonucleotide
  tRNApyl, UAG
ggaaacctgatcatgtagatcgaatggacttagaatccgttcagccgggttagattcccggggtttccg

SEQ ID NO: 233 - DNA, 69 bp, Artificial Sequence
  Description of Artificial Sequence: Synthetic oligonucleotide
  tRNApyl, CCG
ggaaacctgatcatgtagatcgaatggactccgaatccgttcagccgggttagattcccggggtttccg

SEQ ID NO: 234 - DNA, 69 bp, Artificial Sequence
  Description of Artificial Sequence: Synthetic oligonucleotide
  tRNApyl, AUA
ggaaacctgatcatgtagatcgaatggactataaatccgttcagccgggttagattcccggggtttccg

SEQ ID NO: 235 - DNA, 1416 bp, Artificial Sequence
  Description of Artificial Sequence: Synthetic polynucleotide
  OMeRS Pyrrolysyl tRNA Synthetase mutant
atggcgtgcccggtgccgctgcagctgccgccgctggaacgcctgaccctggatgataaaaaaccgctgaataccctgatctctgctactggtctgtggatgagtcgtaccggaaccattcataaaatcaaacaccacgaggttagccgttcgaaaatctatattgagatggcgtgtggcgatcatctggttgtgaacaatagccgctcttctcgtacagcacgtgcactgcgtcaccacaaatatcgtaaaacctgtaaacgttgccgtgtgtccgatgaggatctgaacaaattcctgacaaaagccaatgaggaccaaacaagcgtgaaagtgaaagtcgttagcgctcctacccgtactaaaaaagcaatgccgaaatccgttgctcgtgcccctaaaccactggaaaacactgaagcagcacaggcacagccgtctggaagcaaattctctccggccattcctgtttctacccaggagtccgtttctgttccagcaagtgtgagcaccagcattagcagtattagcaccggtgccaccgctagcgccctggttaaaggcaataccaatccgattacaagcatgtctgccccggttcaagcatcagctccagcactgacaaaatcccaaaccgatcgtctggaggttctgctgaatccgaaagacgaaatcagcctgaattccggcaaaccgtttcgtgaactggagagcgaactgctgtcacgtcgtaaaaaagacctgcaacaaatctatgccgaagaacgtgagaactatctggggaaactggaacgtgaaatcacccgctttttcgtggatcgtggctttctggagatcaaatccccgattctgattcctctggagtatatcgagcgtatgggcatcgacaatgataccgaactgagcaaacaaattttccgtgtggataaaaacttctgtctgcgccctatgctaacaccaaatctgtataactatctgcgcaaactggaccgtgccctgcctgatcctatcaaaatcttcgagatcggcccgtgttatcgtaaagagtccgacggtaaagaacatctggaggagtttaccatgctggtcttttggcaaatgggttcaggttgtactcgtgagaacctggaaagcatcatcaccgattttctgaaccacctgggcattgacttcaaaattgtgggcgacagctgtatggtgtttggcgacaccctggatgtcatgcacggcgacctggaactgtctagtgcccttgtgggcccaatcccgctggatcgtgagtggggtatcgacaaaccttggatcggtgcgggttttggtctggagcgtctgctgaaagtaaaacacgacttcaagaacatcaaacgtgctgcacgttccgagtcctattacaatggtatttctactaacctgtaa

SEQ ID NO: 236 - protein, 471 aa, Artificial Sequence
  Description of Artificial Sequence: Synthetic polypeptide
  OMeRS Pyrrolysyl tRNA Synthetase mutant
MACPVPLQLPPLERLTLDDKKPLNTLISATGLWMSRTGTIHKIKHHEVSRSKIYIEMACGDHLVVNNSRSSRTARALRHHKYRKTCKRCRVSDEDLNKFLTKANEDQTSVKVKVVSAPTRTKKAMPKSVARAPKPLENTEAAQAQPSGSKFSPAIPVSTQESVSVPASVSTSISSISTGATASALVKGNTNPITSMSAPVQASAPALTKSQTDRLEVLLNPKDEISLNSGKPFRELESELLSRRKKDLQQIYAEERENYLGKLEREITRFFVDRGFLEIKSPILIPLEYIERMGIDNDTELSKQIFRVDKNFCLRPMLTPNLYNYLRKLDRALPDPIKIFEIGPCYRKESDGKEHLEEFTMLVFWQMGSGCTRENLESIITDFLNHLGIDFKIVGDSCMVFGDTLDVMHGDLELSSALVGPIPLDREWGIDKPWIGAGFGLERLLKVKHDFKNIKRAARSESYYNGISTNL

SEQ ID NO: 237 - DNA, 914 bp, Artificial Sequence
  Description of Artificial Sequence: Synthetic polynucleotide
  GFP66TAG
atgggccgcctggagagcaccccccccaagaagaagcgcaaggtggaggacagcgccagcgactacaaggacgacgacgacaaggtgagcaagggcgaggagctgttcaccggcgtggtgcccatcctggtggagctggacggcgacgtgaacggccacaagttcagcgtgagcggcgagggcgagggcgacgccacctatggcaagctgaccctgaagttcatctgtaccaccggcaagctgcccgtgccctggcccaccctggtgaccaccctgacctagggcgtgcagtgtttcagccgctaccccgaccacatgaagcagcacgacttcttcaagagcgccatgcccgagggctacgtgcaggagcgcaccatcttcttcaaggacgacggcaactacaagacccgcgccgaggtgaagttcgagggcgacaccctggtgaaccgcatcgagctgaagggcatcgacttcaaggaggacggcaacatcctgggccacaagctggagtacaactacaacagccacaacgtgtacatcatggccgacaagcagaagaacggcatcaaggccaacttcaagatccgccacaacatcgaggacggcagcgtgcagctggccgaccactaccagcagaacacccccatcggcgacggccccgtgctgctgcccgacaaccactacctgagcacccagagcgccctgagcaaggaccccaacgagaagcgcgaccacatggtgctgctggagttcgtgaccgccgccggcatcaccctgggcatggacgagctgtacaagcatcaccatcaccatcactaagcggccgcatcgattataagctttgtacacctagaaaacatgaggatcacccatgtctgcacctcgacactagaaaacatgaggatcacccatgt

SEQ ID NO: 238 - protein, 272 aa, Artificial Sequence
  Description of Artificial Sequence: Synthetic polypeptide
  GFP66TAG
  MOD_RES (94)..(94): Any naturally occurring amino acid
MGRLESTPPKKKRKVEDSASDYKDDDDKVSKGEELFTGVVPILVELDGDVNGHKFSVSGEGEGDATYGKLTLKFICTTGKLPVPWPTLVTTLTXGVQCFSRYPDHMKQHDFFKSAMPEGYVQERTIFFKDDGNYKTRAEVKFEGDTLVNRIELKGIDFKEDGNILGHKLEYNYNSHNVYIMADKQKNGIKANFKIRHNIEDGSVQLADHYQQNTPIGDGPVLLPDNHYLSTQSALSKDPNEKRDHMVLLEFVTAAGITLGMDELYKHHHHHH

SEQ ID NO: 239 - DNA, 914 bp, Artificial Sequence
  Description of Artificial Sequence: Synthetic polynucleotide
  GFP66TCG
atgggccgcctggagagcaccccccccaagaagaagcgcaaggtggaggacagcgccagcgactacaaggacgacgacgacaaggtgagcaagggcgaggagctgttcaccggcgtggtgcccatcctggtggagctggacggcgacgtgaacggccacaagttcagcgtgagcggcgagggcgagggcgacgccacctatggcaagctgaccctgaagttcatctgtaccaccggcaagctgcccgtgccctggcccaccctggtgaccaccctgacctcgggcgtgcagtgtttcagccgctaccccgaccacatgaagcagcacgacttcttcaagagcgccatgcccgagggctacgtgcaggagcgcaccatcttcttcaaggacgacggcaactacaagacccgcgccgaggtgaagttcgagggcgacaccctggtgaaccgcatcgagctgaagggcatcgacttcaaggaggacggcaacatcctgggccacaagctggagtacaactacaacagccacaacgtgtacatcatggccgacaagcagaagaacggcatcaaggccaacttcaagatccgccacaacatcgaggacggcagcgtgcagctggccgaccactaccagcagaacacccccatcggcgacggccccgtgctgctgcccgacaaccactacctgagcacccagagcgccctgagcaaggaccccaacgagaagcgcgaccacatggtgctgctggagttcgtgaccgccgccggcatcaccctgggcatggacgagctgtacaagcatcaccatcaccatcactaagcggccgcatcgattataagctttgtacacctagaaaacatgaggatcacccatgtctgcacctcgacactagaaaacatgaggatcacccatgt

SEQ ID NO: 240 - protein, 272 aa, Artificial Sequence; identical to SEQ ID NO: 238
  Description of Artificial Sequence: Synthetic polypeptide
  GFP66TCG
  MOD_RES (94)..(94): Any naturally occurring amino acid

SEQ ID NO: 241 - DNA, 914 bp, Artificial Sequence
  Description of Artificial Sequence: Synthetic polynucleotide
  GFP66CCG
atgggccgcctggagagcaccccccccaagaagaagcgcaaggtggaggacagcgccagcgactacaaggacgacgacgacaaggtgagcaagggcgaggagctgttcaccggcgtggtgcccatcctggtggagctggacggcgacgtgaacggccacaagttcagcgtgagcggcgagggcgagggcgacgccacctatggcaagctgaccctgaagttcatctgtaccaccggcaagctgcccgtgccctggcccaccctggtgaccaccctgaccccgggcgtgcagtgtttcagccgctaccccgaccacatgaagcagcacgacttcttcaagagcgccatgcccgagggctacgtgcaggagcgcaccatcttcttcaaggacgacggcaactacaagacccgcgccgaggtgaagttcgagggcgacaccctggtgaaccgcatcgagctgaagggcatcgacttcaaggaggacggcaacatcctgggccacaagctggagtacaactacaacagccacaacgtgtacatcatggccgacaagcagaagaacggcatcaaggccaacttcaagatccgccacaacatcgaggacggcagcgtgcagctggccgaccactaccagcagaacacccccatcggcgacggccccgtgctgctgcccgacaaccactacctgagcacccagagcgccctgagcaaggaccccaacgagaagcgcgaccacatggtgctgctggagttcgtgaccgccgccggcatcaccctgggcatggacgagctgtacaagcatcaccatcaccatcactaagcggccgcatcgattataagctttgtacacctagaaaacatgaggatcacccatgtctgcacctcgacactagaaaacatgaggatcacccatgt

SEQ ID NO: 242 - protein, 272 aa, Artificial Sequence; identical to SEQ ID NO: 238
  Description of Artificial Sequence: Synthetic polypeptide
  GFP66CCG
  MOD_RES (94)..(94): Any naturally occurring amino acid

SEQ ID NO: 243 - DNA, 914 bp, Artificial Sequence
  Description of Artificial Sequence: Synthetic polynucleotide
  GFP66CTA
atgggccgcctggagagcaccccccccaagaagaagcgcaaggtggaggacagcgccagcgactacaaggacgacgacgacaaggtgagcaagggcgaggagctgttcaccggcgtggtgcccatcctggtggagctggacggcgacgtgaacggccacaagttcagcgtgagcggcgagggcgagggcgacgccacctatggcaagctgaccctgaagttcatctgtaccaccggcaagctgcccgtgccctggcccaccctggtgaccaccctgaccctaggcgtgcagtgtttcagccgctaccccgaccacatgaagcagcacgacttcttcaagagcgccatgcccgagggctacgtgcaggagcgcaccatcttcttcaaggacgacggcaactacaagacccgcgccgaggtgaagttcgagggcgacaccctggtgaaccgcatcgagctgaagggcatcgacttcaaggaggacggcaacatcctgggccacaagctggagtacaactacaacagccacaacgtgtacatcatggccgacaagcagaagaacggcatcaaggccaacttcaagatccgccacaacatcgaggacggcagcgtgcagctggccgaccactaccagcagaacacccccatcggcgacggccccgtgctgctgcccgacaaccactacctgagcacccagagcgccctgagcaaggaccccaacgagaagcgcgaccacatggtgctgctggagttcgtgaccgccgccggcatcaccctgggcatggacgagctgtacaagcatcaccatcaccatcactaagcggccgcatcgattataagctttgtacacctagaaaacatgaggatcacccatgtctgcacctcgacactagaaaacatgaggatcacccatgt

SEQ ID NO: 244 - protein, 272 aa, Artificial Sequence; identical to SEQ ID NO: 238
  Description of Artificial Sequence: Synthetic polypeptide
  GFP66CTA
  MOD_RES (94)..(94): Any naturally occurring amino acid

SEQ ID NO: 245 - DNA, 914 bp, Artificial Sequence
  Description of Artificial Sequence: Synthetic polynucleotide
  GFP66TTA
atgggccgcctggagagcaccccccccaagaagaagcgcaaggtggaggacagcgccagcgactacaaggacgacgacgacaaggtgagcaagggcgaggagctgttcaccggcgtggtgcccatcctggtggagctggacggcgacgtgaacggccacaagttcagcgtgagcggcgagggcgagggcgacgccacctatggcaagctgaccctgaagttcatctgtaccaccggcaagctgcccgtgccctggcccaccctggtgaccaccctgaccttaggcgtgcagtgtttcagccgctaccccgaccacatgaagcagcacgacttcttcaagagcgccatgcccgagggctacgtgcaggagcgcaccatcttcttcaaggacgacggcaactacaagacccgcgccgaggtgaagttcgagggcgacaccctggtgaaccgcatcgagctgaagggcatcgacttcaaggaggacggcaacatcctgggccacaagctggagtacaactacaacagccacaacgtgtacatcatggccgacaagcagaagaacggcatcaaggccaacttcaagatccgccacaacatcgaggacggcagcgtgcagctggccgaccactaccagcagaacacccccatcggcgacggccccgtgctgctgcccgacaaccactacctgagcacccagagcgccctgagcaaggaccccaacgagaagcgcgaccacatggtgctgctggagttcgtgaccgccgccggcatcaccctgggcatggacgagctgtacaagcatcaccatcaccatcactaagcggccgcatcgattataagctttgtacacctagaaaacatgaggatcacccatgtctgcacctcgacactagaaaacatgaggatcacccatgt

SEQ ID NO: 246 - protein, 272 aa, Artificial Sequence; identical to SEQ ID NO: 238
  Description of Artificial Sequence: Synthetic polypeptide
  GFP66TTA
  MOD_RES (94)..(94): Any naturally occurring amino acid

SEQ ID NO: 247 - DNA, 914 bp, Artificial Sequence
  Description of Artificial Sequence: Synthetic polynucleotide
  GFP66ATA
atgggccgcctggaaagcaccccgccgaaaaaaaaacgcaaagtggaagatagcgcgagcgattacaaagatgatgatgataaagtgagcaagggcgaggagctgttcaccggggtggtgcccatcctggtcgagctggacggcgacgtaaacggccacaagttcagcgtgtccggcgagggcgagggcgatgccacctatggcaagctgaccctgaagttcatctgcaccaccggcaagctgcccgtgccctggcccaccctcgtgaccaccctgaccataggcgtgcagtgcttcagccgctaccccgaccacatgaagcagcacgacttcttcaagtccgccatgcccgaaggctacgtccaggagcgcaccatcttcttcaaggacgacggcaactacaagacccgcgccgaggtgaagttcgagggcgacaccctggtgaaccgcatcgagctgaagggcatcgacttcaaggaggacggcaacatcctggggcacaagctggagtacaactacaacagccacaacgtctatatcatggccgacaagcagaagaacggcatcaaggccaacttcaagatccgccacaacatcgaggacggcagcgtgcagctcgccgaccactaccagcagaacacccccatcggcgacggccccgtgctgctgcccgacaaccactacctgagcacccagtccgccctgagcaaagaccccaacgagaagcgcgatcacatggtcctgctggagttcgtgaccgccgccgggatcactctcggcatggacgagctgtacaagcatcaccatcaccatcactaagcggccgcatcgattataagctttgtacacctagaaaacatgaggatcacccatgtctgcacctcgacactagaaaacatgaggatcacccatgt

SEQ ID NO: 248 - protein, 272 aa, Artificial Sequence; identical to SEQ ID NO: 238
  Description of Artificial Sequence: Synthetic polypeptide
  GFP66ATA
  MOD_RES (94)..(94): Any naturally occurring amino acid

SEQ ID NO: 249 - DNA, 897 bp, Artificial Sequence
  Description of Artificial Sequence: Synthetic polynucleotide
  GFP66CGG
atgggccgcctggagagcaccccccccaagaagaagcgcaaggtggaggacagcgccagcgactacaaggacgacgacgacaaggtgagcaagggcgaggagctgttcaccggcgtggtgcccatcctggtggagctggacggcgacgtgaacggccacaagttcagcgtgagcggcgagggcgagggcgacgccacctatggcaagctgaccctgaagttcatctgtaccaccggcaagctgcccgtgccctggcccaccctggtgaccaccctgacccggggcgtgcagtgtttcagccgctaccccgaccacatgaagcagcacgacttcttcaagagcgccatgcccgagggctacgtgcaggagcgcaccatcttcttcaaggacgacggcaactacaagacccgcgccgaggtgaagttcgagggcgacaccctggtgaaccgcatcgagctgaagggcatcgacttcaaggaggacggcaacatcctgggccacaagctggagtacaactacaacagccacaacgtgtacatcatggccgacaagcagaagaacggcatcaaggccaacttcaagatccgccacaacatcgaggacggcagcgtgcagctggccgaccactaccagcagaacacccccatcggcgacggccccgtgctgctgcccgacaaccactacctgagcacccagagcgccctgagcaaggaccccaacgagaagcgcgaccacatggtgctgctggagttcgtgaccgccgccggcatcaccctgggcatggacgagctgtacaagcaccaccaccaccaccactaaaagctttgtacacctagaaaacatgaggatcacccatgtctgcacctcgacactagaaaacatgaggatcacccatgt

SEQ ID NO: 250 - protein, 272 aa, Artificial Sequence; identical to SEQ ID NO: 238
  Description of Artificial Sequence: Synthetic polypeptide
  GFP66CGG
  MOD_RES (94)..(94): Any naturally occurring amino acid

SEQ ID NO: 251 - DNA, 905 bp, Artificial Sequence
  Description of Artificial Sequence: Synthetic polynucleotide
  GFP39TCG
atgggccgcctggagagcaccccccccaagaagaagcgcaaggtggaggacagcgccagcgactacaaggacgacgacgacaaggtgagcaagggcgaggagctgttcaccggcgtggtgcccatcctggtggagctggacggcgacgtgaacggccacaagttcagcgtgagcggcgagggcgagggcgacgccacctcgggcaagctgaccctgaagttcatctgtaccaccggcaagctgcccgtgccctggcccaccctggtgaccaccctgacctacggcgtgcagtgtttcagccgctaccccgaccacatgaagcagcacgacttcttcaagagcgccatgcccgagggctacgtgcaggagcgcaccatcttcttcaaggacgacggcaactacaagacccgcgccgaggtgaagttcgagggcgacaccctggtgaaccgcatcgagctgaagggcatcgacttcaaggaggacggcaacatcctgggccacaagctggagtacaactacaacagccacaacgtgtacatcatggccgacaagcagaagaacggcatcaaggccaacttcaagatccgccacaacatcgaggacggcagcgtgcagctggccgaccactaccagcagaacacccccatcggcgacggccccgtgctgctgcccgacaaccactacctgagcacccagagcgccctgagcaaggaccccaacgagaagcgcgaccacatggtgctgctggagttcgtgaccgccgccggcatcaccctgggcatggacgagctgtacaagcaccaccaccaccaccataaggatcctaaggatcctaattgcctagaaaacatgaggatcacccatgtctgcaggtcgactctagaaaacatgaggatcacccatgt

SEQ ID NO: 252 - protein, 273 aa, Artificial Sequence
  Description of Artificial Sequence: Synthetic polypeptide
  GFP39TCG
  MOD_RES (67)..(67): Any naturally occurring amino acid
MGRLESTPPKKKRKVEDSASDYKDDDDKVSKGEELFTGVVPILVELDGDVNGHKFSVSGEGEGDATXGKLTLKFICTTGKLPVPWPTLVTTLTYGVQCFSRYPDHMKQHDFFKSAMPEGYVQERTIFFKDDGNYKTRAEVKFEGDTLVNRIELKGIDFKEDGNILGHKLEYNYNSHNVYIMADKQKNGIKANFKIRHNIEDGSVQLADHYQQNTPIGDGPVLLPDNHYLSTQSALSKDPNEKRDHMVLLEFVTAAGITLGMDELYKHHHHHHK

SEQ ID NO: 253 - DNA, 906 bp, Artificial Sequence
  Description of Artificial Sequence: Synthetic polynucleotide
  GFP39CCG
atgggccgcctggagagcaccccccccaagaagaagcgcaaggtggaggacagcgccagcgactacaaggacgacgacgacaaggtgagcaagggcgaggagctgttcaccggcgtggtgcccatcctggtggagctggacggcgacgtgaacggccacaagttcagcgtgagcggcgagggcgagggcgacgccaccccgggcaagctgaccctgaagttcatctgtaccaccggcaagctgcccgtgccctggcccaccctggtgaccaccctgacctacggcgtgcagtgtttcagccgctaccccgaccacatgaagcagcacgacttcttcaagagcgccatgcccgagggctacgtgcaggagcgcaccatcttcttcaaggacgacggcaactacaagacccgcgccgaggtgaagttcgagggcgacaccctggtgaaccgcatcgagctgaagggcatcgacttcaaggaggacggcaacatcctgggccacaagctggagtacaactacaacagccacaacgtgtacatcatggccgacaagcagaagaacggcatcaaggccaacttcaagatccgccacaacatcgaggacggcagcgtgcagctggccgaccactaccagcagaacacccccatcggcgacggccccgtgctgctgcccgacaaccactacctgagcacccagagcgccctgagcaaggaccccaacgagaagcgcgaccacatggtgctgctggagttcgtgaccgccgccggcatcaccctgggcatggacgagctgtacaagcaccaccaccaccaccactaaagatcctaaggatcctaattgcctagaaaacatgaggatcacccatgtctgcaggtcgactctagaaaacatgaggatcacccatgt

SEQ ID NO: 254 - protein, 273 aa, Artificial Sequence; identical to SEQ ID NO: 252
  Description of Artificial Sequence: Synthetic polypeptide
  GFP39CCG
  MOD_RES (67)..(67): Any naturally occurring amino acid

SEQ ID NO: 255 - DNA, 906 bp, Artificial Sequence
  Description of Artificial Sequence: Synthetic polynucleotide
  GFP39CTA
atgggccgcctggagagcaccccccccaagaagaagcgcaaggtggaggacagcgccagcgactacaaggacgacgacgacaaggtgagcaagggcgaggagctgttcaccggcgtggtgcccatcctggtggagctggacggcgacgtgaacggccacaagttcagcgtgagcggcgagggcgagggcgacgccaccctaggcaagctgaccctgaagttcatctgtaccaccggcaagctgcccgtgccctggcccaccctggtgaccaccctgacctacggcgtgcagtgtttcagccgctaccccgaccacatgaagcagcacgacttcttcaagagcgccatgcccgagggctacgtgcaggagcgcaccatcttcttcaaggacgacggcaactacaagacccgcgccgaggtgaagttcgagggcgacaccctggtgaaccgcatcgagctgaagggcatcgacttcaaggaggacggcaacatcctgggccacaagctggagtacaactacaacagccacaacgtgtacatcatggccgacaagcagaagaacggcatcaaggccaacttcaagatccgccacaacatcgaggacggcagcgtgcagctggccgaccactaccagcagaacacccccatcggcgacggccccgtgctgctgcccgacaaccactacctgagcacccagagcgccctgagcaaggaccccaacgagaagcgcgaccacatggtgctgctggagttcgtgaccgccgccggcatcaccctgggcatggacgagctgtacaagcaccaccaccaccaccactaaagatcctaaggatcctaattgcctagaaaacatgaggatcacccatgtctgcaggtcgactctagaaaacatgaggatcacccatgt

SEQ ID NO: 256 - protein, 273 aa, Artificial Sequence; identical to SEQ ID NO: 252
  Description of Artificial Sequence: Synthetic polypeptide
  GFP39CTA
  MOD_RES (67)..(67): Any naturally occurring amino acid

SEQ ID NO: 257 - DNA, 907 bp, Artificial Sequence
  Description of Artificial Sequence: Synthetic polynucleotide
  GFP39CGG
atgggccgcctggagagcaccccccccaagaagaagcgcaaggtggaggacagcgccagcgactacaaggacgacgacgacaaggtgagcaagggcgaggagctgttcaccggcgtggtgcccatcctggtggagctggacggcgacgtgaacggccacaagttcagcgtgagcggcgagggcgagggcgacgccacccggggcaagctgaccctgaagttcatctgtaccaccggcaagctgcccgtgccctggcccaccctggtgaccaccctgacctacggcgtgcagtgtttcagccgctaccccgaccacatgaagcagcacgacttcttcaagagcgccatgcccgagggctacgtgcaggagcgcaccatcttcttcaaggacgacggcaactacaagacccgcgccgaggtgaagttcgagggcgacaccctggtgaaccgcatcgagctgaagggcatcgacttcaaggaggacggcaacatcctgggccacaagctggagtacaactacaacagccacaacgtgtacatcatggccgacaagcagaagaacggcatcaaggccaacttcaagatccgccacaacatcgaggacggcagcgtgcagctggccgaccactaccagcagaacacccccatcggcgacggccccgtgctgctgcccgacaaccactacctgagcacccagagcgccctgagcaaggaccccaacgagaagcgcgaccacatggtgctgctggagttcgtgaccgccgccggcatcaccctgggcatggacgagctgtacaagcaccaccaccaccaccactaaagatcctaaggatcctaattgcctagaaaacatgaggatcacccatgtctgcaggtcgactctagaaaacatgaggatcacccatgtc

SEQ ID NO: 258 - protein, 273 aa, Artificial Sequence; identical to SEQ ID NO: 252
  Description of Artificial Sequence: Synthetic polypeptide
  GFP39CGG
  MOD_RES (67)..(67): Any naturally occurring amino acid

SEQ ID NO: 259 - DNA, 917 bp, Artificial Sequence
  Description of Artificial Sequence: Synthetic polynucleotide
  mCherry72TAG
atgggccgcctggaaagcaccccgccgaaaaaaaaacgcaaagtggaagatagcgcgagcgattacaaagatgatgatgataaagtggcgtacgcggtgagcaagggcgaggaggataacatggccatcatcaaggagttcatgcgcttcaaggtgcacatggagggctccgtgaacggccacgagttcgagatcgagggcgagggcgagggccgcccctacgagggcacccagaccgccaagctgaaggtgaccaagggtggccccctgcccttcgcctgggacatcctgtcccctcagttcatgtagggctccaaggcctacgtgaagcaccccgccgacatccccgactacttgaagctgtccttccccgagggcttcaagtgggagcgcgtgatgaacttcgaggacggcggcgtggtgaccgtgacccaggactcctccctgcaggacggcgagttcatctacaaggtgaagctgcgcggcaccaacttcccctccgacggccccgtaatgcagaagaagacgatgggctgggaggcctcctccgagcggatgtaccccgaggacggcgccctgaagggcgagatcaagcagaggctgaagctgaaggacggcggccactacgacgctgaggtcaagaccacctacaaggccaagaagcccgtgcagctgcccggcgcctacaacgtcaacatcaagttggacatcacctcccacaacgaggactacaccatcgtggaacagtacgaacgcgccgagggccgccactccaccggcggcatggacgagctgtacaagcatcaccatcaccatcactaagcggccgcatcgattataagctttgtacacctagaaaacatgaggatcacccatgtctgcacctcgacactagaaaacatgaggatcacccatgt

SEQ ID NO: 260 - protein, 273 aa, Artificial Sequence
  Description of Artificial Sequence: Synthetic polypeptide
  mCherry72TAG
  MOD_RES (103)..(103): Any naturally occurring amino acid
MGRLESTPPKKKRKVEDSASDYKDDDDKVAYAVSKGEEDNMAIIKEFMRFKVHMEGSVNGHEFEIEGEGEGRPYEGTQTAKLKVTKGGPLPFAWDILSPQFMXGSKAYVKHPADIPDYLKLSFPEGFKWERVMNFEDGGVVTVTQDSSLQDGEFIYKVKLRGTNFPSDGPVMQKKTMGWEASSERMYPEDGALKGEIKQRLKLKDGGHYDAEVKTTYKAKKPVQLPGAYNVNIKLDITSHNEDYTIVEQYERAEGRHSTGGMDELYKHHHHHH

SEQ ID NO: 261 - DNA, 917 bp, Artificial Sequence
  Description of Artificial Sequence: Synthetic polynucleotide
  mCherry72TCG
atgggccgcctggaaagcaccccgccgaaaaaaaaacgcaaagtggaagatagcgcgagcgattacaaagatgatgatgataaagtggcgtacgcggtgagcaagggcgaggaggataacatggccatcatcaaggagttcatgcgcttcaaggtgcacatggagggctccgtgaacggccacgagttcgagatcgagggcgagggcgagggccgcccctacgagggcacccagaccgccaagctgaaggtgaccaagggtggccccctgcccttcgcctgggacatcctgtcccctcagttcatgtcgggctccaaggcctacgtgaagcaccccgccgacatccccgactacttgaagctgtccttccccgagggcttcaagtgggagcgcgtgatgaacttcgaggacggcggcgtggtgaccgtgacccaggactcctccctgcaggacggcgagttcatctacaaggtgaagctgcgcggcaccaacttcccctccgacggccccgtaatgcagaagaagacgatgggctgggaggcctcctccgagcggatgtaccccgaggacggcgccctgaagggcgagatcaagcagaggctgaagctgaaggacggcggccactacgacgctgaggtcaagaccacctacaaggccaagaagcccgtgcagctgcccggcgcctacaacgtcaacatcaagttggacatcacctcccacaacgaggactacaccatcgtggaacagtacgaacgcgccgagggccgccactccaccggcggcatggacgagctgtacaagcatcaccatcaccatcactaagcggccgcatcgattataagctttgtacacctagaaaacatgaggatcacccatgtctgcacctcgacactagaaaacatgaggatcacccatgt

SEQ ID NO: 262 - protein, 273 aa, Artificial Sequence; identical to SEQ ID NO: 260
  Description of Artificial Sequence: Synthetic polypeptide
  mCherry72TCG
  MOD_RES (103)..(103): Any naturally occurring amino acid

SEQ ID NO: 263 - DNA, 917 bp, Artificial Sequence
  Description of Artificial Sequence: Synthetic polynucleotide
  mCherry72CCG
atgggccgcctggaaagcaccccgccgaaaaaaaaacgcaaagtggaagatagcgcgagcgattacaaagatgatgatgataaagtggcgtacgcggtgagcaagggcgaggaggataacatggccatcatcaaggagttcatgcgcttcaaggtgcacatggagggctccgtgaacggccacgagttcgagatcgagggcgagggcgagggccgcccctacgagggcacccagaccgccaagctgaaggtgaccaagggtggccccctgcccttcgcctgggacatcctgtcccctcagttcatgccgggctccaaggcctacgtgaagcaccccgccgacatccccgactacttgaagctgtccttccccgagggcttcaagtgggagcgcgtgatgaacttcgaggacggcggcgtggtgaccgtgacccaggactcctccctgcaggacggcgagttcatctacaaggtgaagctgcgcggcaccaacttcccctccgacggccccgtaatgcagaagaagacgatgggctgggaggcctcctccgagcggatgtaccccgaggacggcgccctgaagggcgagatcaagcagaggctgaagctgaaggacggcggccactacgacgctgaggtcaagaccacctacaaggccaagaagcccgtgcagctgcccggcgcctacaacgtcaacatcaagttggacatcacctcccacaacgaggactacaccatcgtggaacagtacgaacgcgccgagggccgccactccaccggcggcatggacgagctgtacaagcatcaccatcaccatcactaagcggccgcatcgattataagctttgtacacctagaaaacatgaggatcacccatgtctgcacctcgacactagaaaacatgaggatcacccatgt

SEQ ID NO: 264 - protein, 273 aa, Artificial Sequence; identical to SEQ ID NO: 260
  Description of Artificial Sequence: Synthetic polypeptide
  mCherry72CCG
  MOD_RES (103)..(103): Any naturally occurring amino acid

SEQ ID NO: 265 - DNA, 917 bp, Artificial Sequence
  Description of Artificial Sequence: Synthetic polynucleotide
  mCherry72CTA
atgggccgcctggaaagcaccccgccgaaaaaaaaacgcaaagtggaagatagcgcgagcgattacaaagatgatgatgataaagtggcgtacgcggtgagcaagggcgaggaggataacatggccatcatcaaggagttcatgcgcttcaaggtgcacatggagggctccgtgaacggccacgagttcgagatcgagggcgagggcgagggccgcccctacgagggcacccagaccgccaagctgaaggtgaccaagggtggccccctgcccttcgcctgggacatcctgtcccctcagttcatgctaggctccaaggcctacgtgaagcaccccgccgacatccccgactacttgaagctgtccttccccgagggcttcaagtgggagcgcgtgatgaacttcgaggacggcggcgtggtgaccgtgacccaggactcctccctgcaggacggcgagttcatctacaaggtgaagctgcgcggcaccaacttcccctccgacggccccgtaatgcagaagaagacgatgggctgggaggcctcctccgagcggatgtaccccgaggacggcgccctgaagggcgagatcaagcagaggctgaagctgaaggacggcggccactacgacgctgaggtcaagaccacctacaaggccaagaagcccgtgcagctgcccggcgcctacaacgtcaacatcaagttggacatcacctcccacaacgaggactacaccatcgtggaacagtacgaacgcgccgagggccgccactccaccggcggcatggacgagctgtacaagcatcaccatcaccatcactaagcggccgcatcgattataagctttgtacacctagaaaacatgaggatcacccatgtctgcacctcgacactagaaaacatgaggatcacccatgt

SEQ ID NO: 266 - protein, 273 aa, Artificial Sequence; identical to SEQ ID NO: 260
  Description of Artificial Sequence: Synthetic polypeptide
  mCherry72CTA
  MOD_RES (103)..(103): Any naturally occurring amino acid

SEQ ID NO: 267 - DNA, 917 bp, Artificial Sequence
  Description of Artificial Sequence: Synthetic polynucleotide
  mCherry72TTA
atgggccgcctggaaagcaccccgccgaaaaaaaaacgcaaagtggaagatagcgcgagcgattacaaagatgatgatgataaagtggcgtacgcggtgagcaagggcgaggaggataacatggccatcatcaaggagttcatgcgcttcaaggtgcacatggagggctccgtgaacggccacgagttcgagatcgagggcgagggcgagggccgcccctacgagggcacccagaccgccaagctgaaggtgaccaagggtggccccctgcccttcgcctgggacatcctgtcccctcagttcatgttaggctccaaggcctacgtgaagcaccccgccgacatccccgactacttgaagctgtccttccccgagggcttcaagtgggagcgcgtgatgaacttcgaggacggcggcgtggtgaccgtgacccaggactcctccctgcaggacggcgagttcatctacaaggtgaagctgcgcggcaccaacttcccctccgacggccccgtaatgcagaagaagacgatgggctgggaggcctcctccgagcggatgtaccccgaggacggcgccctgaagggcgagatcaagcagaggctgaagctgaaggacggcggccactacgacgctgaggtcaagaccacctacaaggccaagaagcccgtgcagctgcccggcgcctacaacgtcaacatcaagttggacatcacctcccacaacgaggactacaccatcgtggaacagtacgaacgcgccgagggccgccactccaccggcggcatggacgagctgtacaagcatcaccatcaccatcactaagcggccgcatcgattataagctttgtacacctagaaaacatgaggatcacccatgtctgcacctcgacactagaaaacatgaggatcacccatgt

SEQ ID NO: 268 - protein, 273 aa, Artificial Sequence; identical to SEQ ID NO: 260
  Description of Artificial Sequence: Synthetic polypeptide
  mCherry72TTA
  MOD_RES (103)..(103): Any naturally occurring amino acid

SEQ ID NO: 269 - DNA, 917 bp, Artificial Sequence
  Description of Artificial Sequence: Synthetic polynucleotide
  mCherry72ATA
atgggccgcctggaaagcaccccgccgaaaaaaaaacgcaaagtggaagatagcgcgagcgattacaaagatgatgatgataaagtggcgtacgcggtgagcaagggcgaggaggataacatggccatcatcaaggagttcatgcgcttcaaggtgcacatggagggctccgtgaacggccacgagttcgagatcgagggcgagggcgagggccgcccctacgagggcacccagaccgccaagctgaaggtgaccaagggtggccccctgcccttcgcctgggacatcctgtcccctcagttcatgataggctccaaggcctacgtgaagcaccccgccgacatccccgactacttgaagctgtccttccccgagggcttcaagtgggagcgcgtgatgaacttcgaggacggcggcgtggtgaccgtgacccaggactcctccctgcaggacggcgagttcatctacaaggtgaagctgcgcggcaccaacttcccctccgacggccccgtaatgcagaagaagacgatgggctgggaggcctcctccgagcggatgtaccccgaggacggcgccctgaagggcgagatcaagcagaggctgaagctgaaggacggcggccactacgacgctgaggtcaagaccacctacaaggccaagaagcccgtgcagctgcccggcgcctacaacgtcaacatcaagttggacatcacctcccacaacgaggactacaccatcgtggaacagtacgaacgcgccgagggccgccactccaccggcggcatggacgagctgtacaagcatcaccatcaccatcactaagcggccgcatcgattataagctttgtacacctagaaaacatgaggatcacccatgtctgcacctcgacactagaaaacatgaggatcacccatgt

SEQ ID NO: 270 - protein, 273 aa, Artificial Sequence; identical to SEQ ID NO: 260
  Description of Artificial Sequence: Synthetic polypeptide
  mCherry72ATA
  MOD_RES (103)..(103): Any naturally occurring amino acid

SEQ ID NO: 271 - DNA, 786 bp, Artificial Sequence
  Description of Artificial Sequence: Synthetic polynucleotide
  mCherry185TCG
atgggccgcctggagagcaccccccccaagaagaagcgcaaggtggaggacagcgccagcgtgagcaagggcgaggaggacaacatggccatcatcaaggagttcatgcgcttcaaggtgcacatggagggcagcgtgaacggccacgagttcgagatcgagggcgagggcgagggccgcccctacgagggcacccagaccgccaagctgaaggtgaccaagggcggccccctgcccttcgcctgggacatcctgagcccccagttcatgtacggcagcaaggcctacgtgaagcaccccgccgacatccccgactacctgaagctgagcttccccgagggcttcaagtgggagcgcgtgatgaacttcgaggacggcggcgtggtgaccgtgacccaggacagcagcctgcaggacggcgagttcatctacaaggtgaagctgcgcggcaccaacttccccagcgacggccccgtgatgcagaagaagaccatgggctgggaggccagcagcgagcgcatgtaccccgaggacggcgccctgaagggcgagatcaagcagcgcctgaagctgaaggacggcggccactacgacgccgaggtgaagaccacctacaaggccaagtcgcccgtgcagctgcccggcgcctacaacgtgaacatcaagctggacatcaccagccacaacgaggactacaccatcgtggagcagtacgagcgcgccgagggccgccacagcaccggcggcatggacgagctgtacaagcaccaccaccaccaccactaa

SEQ ID NO: 272 - protein, 261 aa, Artificial Sequence; identical to SEQ ID NO: 180
  Description of Artificial Sequence: Synthetic polypeptide
  mCherry185TCG
  MOD_RES (209)..(209): Any naturally occurring amino acid

SEQ ID NO: 273 - DNA, 786 bp, Artificial Sequence
  Description of Artificial Sequence: Synthetic polynucleotide
  mCherry185CCG
atgggccgcctggagagcaccccccccaagaagaagcgcaaggtggaggacagcgccagcgtgagcaagggcgaggaggacaacatggccatcatcaaggagttcatgcgcttcaaggtgcacatggagggcagcgtgaacggccacgagttcgagatcgagggcgagggcgagggccgcccctacgagggcacccagaccgccaagctgaaggtgaccaagggcggccccctgcccttcgcctgggacatcctgagcccccagttcatgtacggcagcaaggcctacgtgaagcaccccgccgacatccccgactacctgaagctgagcttccccgagggcttcaagtgggagcgcgtgatgaacttcgaggacggcggcgtggtgaccgtgacccaggacagcagcctgcaggacggcgagttcatctacaaggtgaagctgcgcggcaccaacttccccagcgacggccccgtgatgcagaagaagaccatgggctgggaggccagcagcgagcgcatgtaccccgaggacggcgccctgaagggcgagatcaagcagcgcctgaagctgaaggacggcggccactacgacgccgaggtgaagaccacctacaaggccaagccgcccgtgcagctgcccggcgcctacaacgtgaacatcaagctggacatcaccagccacaacgaggactacaccatcgtggagcagtacgagcgcgccgagggccgccacagcaccggcggcatggacgagctgtacaagcaccaccaccaccaccactaa

SEQ ID NO: 274 - protein, 261 aa, Artificial Sequence; identical to SEQ ID NO: 180
  Description of Artificial Sequence: Synthetic polypeptide
  mCherry185CCG
  MOD_RES (209)..(209): Any naturally occurring amino acid

SEQ ID NO: 275 - DNA, 786 bp, Artificial Sequence
  Description of Artificial Sequence: Synthetic polynucleotide
  mCherry185CTA
atgggccgcctggagagcaccccccccaagaagaagcgcaaggtggaggacagcgccagcgtgagcaagggcgaggaggacaacatggccatcatcaaggagttcatgcgcttcaaggtgcacatggagggcagcgtgaacggccacgagttcgagatcgagggcgagggcgagggccgcccctacgagggcacccagaccgccaagctgaaggtgaccaagggcggccccctgcccttcgcctgggacatcctgagcccccagttcatgtacggcagcaaggcctacgtgaagcaccccgccgacatccccgactacctgaagctgagcttccccgagggcttcaagtgggagcgcgtgatgaacttcgaggacggcggcgtggtgaccgtgacccaggacagcagcctgcaggacggcgagttcatctacaaggtgaagctgcgcggcaccaacttccccagcgacggccccgtgatgcagaagaagaccatgggctgggaggccagcagcgagcgcatgtaccccgaggacggcgccctgaagggcgagatcaagcagcgcctgaagctgaaggacggcggccactacgacgccgaggtgaagaccacctacaaggccaagctacccgtgcagctgcccggcgcctacaacgtgaacatcaagctggacatcaccagccacaacgaggactacaccatcgtggagcagtacgagcgcgccgagggccgccacagcaccggcggcatggacgagctgtacaagcaccaccaccaccaccactaa

SEQ ID NO: 276 - protein, 261 aa, Artificial Sequence; identical to SEQ ID NO: 180
  Description of Artificial Sequence: Synthetic polypeptide
  mCherry185CTA
  MOD_RES (209)..(209): Any naturally occurring amino acid

SEQ ID NO: 277 - DNA, 855 bp, Artificial Sequence
  Description of Artificial Sequence: Synthetic polynucleotide
  GFP39TCG
atgggctgcgtgtgcagcagcaaccccgagggtaccgagctcgtgagcaagggcgaggagctgttcaccggcgtggtgcccatcctggtggagctggacggcgacgtgaacggccacaagttcagcgtgagcggcgagggcgagggcgacgccacctcgggcaagctgaccctgaagttcatctgtaccaccggcaagctgcccgtgccctggcccaccctggtgaccaccctgacctacggcgtgcagtgtttcagccgctaccccgaccacatgaagcagcacgacttcttcaagagcgccatgcccgagggctacgtgcaggagcgcaccatcttcttcaaggacgacggcaactacaagacccgcgccgaggtgaagttcgagggcgacaccctggtgaaccgcatcgagctgaagggcatcgacttcaaggaggacggcaacatcctgggccacaagctggagtacaactacaacagccacaacgtgtacatcatggccgacaagcagaagaacggcatcaaggccaacttcaagatccgccacaacatcgaggacggcagcgtgcagctggccgaccactaccagcagaacacccccatcggcgacggccccgtgctgctgcccgacaaccactacctgagcacccagagcgccctgagcaaggaccccaacgagaagcgcgaccacatggtgctgctggagttcgtgaccgccgccggcatcaccctgggcatggacgagctgtacaagcaccaccaccaccaccactaaaagctttgtacacctagaaaacatgaggatcacccatgtctgcacctcgacactagaaaacatgaggatcacccatgt

SEQ ID NO: 278 - protein, 258 aa, Artificial Sequence
  Description of Artificial Sequence: Synthetic polypeptide
  GFP39TCG
  MOD_RES (53)..(53): Any naturally occurring amino acid
MGCVCSSNPEGTELVSKGEELFTGVVPILVELDGDVNGHKFSVSGEGEGDATXGKLTLKFICTTGKLPVPWPTLVTTLTYGVQCFSRYPDHMKQHDFFKSAMPEGYVQERTIFFKDDGNYKTRAEVKFEGDTLVNRIELKGIDFKEDGNILGHKLEYNYNSHNVYIMADKQKNGIKANFKIRHNIEDGSVQLADHYQQNTPIGDGPVLLPDNHYLSTQSALSKDPNEKRDHMVLLEFVTAAGITLGMDELYKHHHHHH

SEQ ID NO: 279 - DNA, 855 bp, Artificial Sequence
  Description of Artificial Sequence: Synthetic polynucleotide
  GFP39CCG
atgggctgcgtgtgcagcagcaaccccgagggtaccgagctcgtgagcaagggcgaggagctgttcaccggcgtggtgcccatcctggtggagctggacggcgacgtgaacggccacaagttcagcgtgagcggcgagggcgagggcgacgccaccccgggcaagctgaccctgaagttcatctgtaccaccggcaagctgcccgtgccctggcccaccctggtgaccaccctgacctacggcgtgcagtgtttcagccgctaccccgaccacatgaagcagcacgacttcttcaagagcgccatgcccgagggctacgtgcaggagcgcaccatcttcttcaaggacgacggcaactacaagacccgcgccgaggtgaagttcgagggcgacaccctggtgaaccgcatcgagctgaagggcatcgacttcaaggaggacggcaacatcctgggccacaagctggagtacaactacaacagccacaacgtgtacatcatggccgacaagcagaagaacggcatcaaggccaacttcaagatccgccacaacatcgaggacggcagcgtgcagctggccgaccactaccagcagaacacccccatcggcgacggccccgtgctgctgcccgacaaccactacctgagcacccagagcgccctgagcaaggaccccaacgagaagcgcgaccacatggtgctgctggagttcgtgaccgccgccggcatcaccctgggcatggacgagctgtacaagcaccaccaccaccaccactaaaagctttgtacacctagaaaacatgaggatcacccatgtctgcacctcgacactagaaaacatgaggatcacccatgt

SEQ ID NO: 280 - protein, 258 aa, Artificial Sequence; identical to SEQ ID NO: 278
  Description of Artificial Sequence: Synthetic polypeptide
  GFP39CCG
  MOD_RES (53)..(53): Any naturally occurring amino acid

SEQ ID NO: 281 - DNA, 855 bp, Artificial Sequence
  Description of Artificial Sequence: Synthetic polynucleotide
  GFP39CTA
atgggctgcgtgtgcagcagcaaccccgagggtaccgagctcgtgagcaagggcgaggagctgttcaccggcgtggtgcccatcctggtggagctggacggcgacgtgaacggccacaagttcagcgtgagcggcgagggcgagggcgacgccaccctaggcaagctgaccctgaagttcatctgtaccaccggcaagctgcccgtgccctggcccaccctggtgaccaccctgacctacggcgtgcagtgtttcagccgctaccccgaccacatgaagcagcacgacttcttcaagagcgccatgcccgagggctacgtgcaggagcgcaccatcttcttcaaggacgacggcaactacaagacccgcgccgaggtgaagttcgagggcgacaccctggtgaaccgcatcgagctgaagggcatcgacttcaaggaggacggcaacatcctgggccacaagctggagtacaactacaacagccacaacgtgtacatcatggccgacaagcagaagaacggcatcaaggccaacttcaagatccgccacaacatcgaggacggcagcgtgcagctggccgaccactaccagcagaacacccccatcggcgacggccccgtgctgctgcccgacaaccactacctgagcacccagagcgccctgagcaaggaccccaacgagaagcgcgaccacatggtgctgctggagttcgtgaccgccgccggcatcaccctgggcatggacgagctgtacaagcaccaccaccaccaccactaaaagctttgtacacctagaaaacatgaggatcacccatgtctgcacctcgacactagaaaacatgaggatcacccatgt

SEQ ID NO: 282 - protein, 258 aa, Artificial Sequence; identical to SEQ ID NO: 278
  Description of Artificial Sequence: Synthetic polypeptide
  GFP39CTA
  MOD_RES (53)..(53): Any naturally occurring amino acid

SEQ ID NO: 283 - DNA, 1650 bp, Artificial Sequence
  Description of Artificial Sequence: Synthetic polynucleotide
  Extended GFP39TCG
atgggccgcctggagagcaccccccccaagaagaagcgcaaggtggaggacagcgccagcgactacaaggacgacgacgacaaggtgagcaagggcgaggagctgttcaccggcgtggtgcccatcctggtggagctggacggcgacgtgaacggccacaagttcagcgtgagcggcgagggcgagggcgacgccacctcgggcaagctgaccctgaagttcatctgtaccaccggcaagctgcccgtgccctggcccaccctggtgaccaccctgacctacggcgtgcagtgtttcagccgctaccccgaccacatgaagcagcacgacttcttcaagagcgccatgcccgagggctacgtgcaggagcgcaccatcttcttcaaggacgacggcaactacaagacccgcgccgaggtgaagttcgagggcgacaccctggtgaaccgcatcgagctgaagggcatcgacttcaaggaggacggcaacatcctgggccacaagctggagtacaactacaacagccacaacgtgtacatcatggccgacaagcagaagaacggcatcaaggccaacttcaagatccgccacaacatcgaggacggcagcgtgcagctggccgaccactaccagcagaacacccccatcggcgacggccccgtgctgctgcccgacaaccactacctgagcacccagagcgccctgagcaaggaccccaacgagaagcgcgaccacatggtgctgctggagttcgtgaccgccgccggcatcaccctgggcatggacgagctgtacaagggagcaccaggaagtgctggttctgctgctggtagtggagtgagcaagggcgaggagctgttcaccggcgtggtgcccatcctggtggagctggacggcgacgtgaacggccacaagttcagcgtgagcggcgagggcgagggcgacgccacctatggcaagctgaccctgaagttcatctgtaccaccggcaagctgcccgtgccctggcccaccctggtgaccaccctgaccccgggcgtgcagtgtttcagccgctaccccgaccacatgaagcagcacgacttcttcaagagcgccatgcccgagggctacgtgcaggagcgcaccatcttcttcaaggacgacggcaactacaagacccgcgccgaggtgaagttcgagggcgacaccctggtgaaccgcatcgagctgaagggcatcgacttcaaggaggacggcaacatcctgggccacaagctggagtacaactacaacagccacaacgtgtacatcatggccgacaagcagaagaacggcatcaaggccaacttcaagatccgccacaacatcgaggacggcagcgtgcagctggccgaccactaccagcagaacacccccatcggcgacggccccgtgctgctgcccgacaaccactacctgagcacccagagcgccctgagcaaggaccccaacgagaagcgcgaccacatggtgctgctggagttcgtgaccgccgccggcatcaccctgggcatggacgagctgtacaagcaccaccaccaccaccactaaaagctttgtacacctagaaaacatgaggatcacccatgtctgcacctcgacactagaaaacatgaggatcacccatgt

SEQ ID NO: 284 - protein, 523 aa, Artificial Sequence
  Description of Artificial Sequence: Synthetic polypeptide
  Extended GFP39TCG
  MOD_RES (67)..(67): Any naturally occurring amino acid
MGRLESTPPKKKRKVEDSASDYKDDDDKVSKGEELFTGVVPILVELDGDVNGHKFSVSGEGEGDATXGKLTLKFICTTGKLPVPWPTLVTTLTYGVQCFSRYPDHMKQHDFFKSAMPEGYVQERTIFFKDDGNYKTRAEVKFEGDTLVNRIELKGIDFKEDGNILGHKLEYNYNSHNVYIMADKQKNGIKANFKIRHNIEDGSVQLADHYQQNTPIGDGPVLLPDNHYLSTQSALSKDPNEKRDHMVLLEFVTAAGITLGMDELYKGAPGSAGSAAGSGVSKGEELFTGVVPILVELDGDVNGHKFSVSGEGEGDATYGKLTLKFICTTGKLPVPWPTLVTTLTPGVQCFSRYPDHMKQHDFFKSAMPEGYVQERTIFFKDDGNYKTRAEVKFEGDTLVNRIELKGIDFKEDGNILGHKLEYNYNSHNVYIMADKQKNGIKANFKIRHNIEDGSVQLADHYQQNTPIGDGPVLLPDNHYLSTQSALSKDPNEKRDHMVLLEFVTAAGITLGMDELYKHHHHHH

SEQ ID NO: 285 - DNA, 1667 bp, Artificial Sequence
  Description of Artificial Sequence: Synthetic polynucleotide
  Extended GFP39CCG
atgggccgcctggagagcaccccccccaagaagaagcgcaaggtggaggacagcgccagcgactacaaggacgacgacgacaaggtgagcaagggcgaggagctgttcaccggcgtggtgcccatcctggtggagctggacggcgacgtgaacggccacaagttcagcgtgagcggcgagggcgagggcgacgccaccccgggcaagctgaccctgaagttcatctgtaccaccggcaagctgcccgtgccctggcccaccctggtgaccaccctgacctacggcgtgcagtgtttcagccgctaccccgaccacatgaagcagcacgacttcttcaagagcgccatgcccgagggctacgtgcaggagcgcaccatcttcttcaaggacgacggcaactacaagacccgcgccgaggtgaagttcgagggcgacaccctggtgaaccgcatcgagctgaagggcatcgacttcaaggaggacggcaacatcctgggccacaagctggagtacaactacaacagccacaacgtgtacatcatggccgacaagcagaagaacggcatcaaggccaacttcaagatccgccacaacatcgaggacggcagcgtgcagctggccgaccactaccagcagaacacccccatcggcgacggccccgtgctgctgcccgacaaccactacctgagcacccagagcgccctgagcaaggaccccaacgagaagcgcgaccacatggtgctgctggagttcgtgaccgccgccggcatcaccctgggcatggacgagctgtacaagggagcaccaggaagtgctggttctgctgctggtagtggagtgagcaagggcgaggagctgttcaccggcgtggtgcccatcctggtggagctggacggcgacgtgaacggccacaagttcagcgtgagcggcgagggcgagggcgacgccacctatggcaagctgaccctgaagttcatctgtaccaccggcaagctgcccgtgccctggcccaccctggtgaccaccctgacctcgggcgtgcagtgtttcagccgctaccccgaccacatgaagcagcacgacttcttcaagagcgccatgcccgagggctacgtgcaggagcgcaccatcttcttcaaggacgacggcaactacaagacccgcgccgaggtgaagttcgagggcgacaccctggtgaaccgcatcgagctgaagggcatcgacttcaaggaggacggcaacatcctgggccacaagctggagtacaactacaacagccacaacgtgtacatcatggccgacaagcagaagaacggcatcaaggccaacttcaagatccgccacaacatcgaggacggcagcgtgcagctggccgaccactaccagcagaacacccccatcggcgacggccccgtgctgctgcccgacaaccactacctgagcacccagagcgccctgagcaaggaccccaacgagaagcgcgaccacatggtgctgctggagttcgtgaccgccgccggcatcaccctgggcatggacgagctgtacaagcatcaccatcaccatcactaagcggccgcatcgattataagctttgtacacctagaaaacatgaggatcacccatgtctgcacctcgacactagaaaacatgaggatcacccatgt

SEQ ID NO: 286 - protein, 523 aa, Artificial Sequence
  Description of Artificial Sequence: Synthetic polypeptide
  Extended GFP39CCG
  MOD_RES (67)..(67): Any naturally occurring amino acid
MGRLESTPPKKKRKVEDSASDYKDDDDKVSKGEELFTGVVPILVELDGDVNGHKFSVSGEGEGDATXGKLTLKFICTTGKLPVPWPTLVTTLTYGVQCFSRYPDHMKQHDFFKSAMPEGYVQERTIFFKDDGNYKTRAEVKFEGDTLVNRIELKGIDFKEDGNILGHKLEYNYNSHNVYIMADKQKNGIKANFKIRHNIEDGSVQLADHYQQNTPIGDGPVLLPDNHYLSTQSALSKDPNEKRDHMVLLEFVTAAGITLGMDELYKGAPGSAGSAAGSGVSKGEELFTGVVPILVELDGDVNGHKFSVSGEGEGDATYGKLTLKFICTTGKLPVPWPTLVTTLTSGVQCFSRYPDHMKQHDFFKSAMPEGYVQERTIFFKDDGNYKTRAEVKFEGDTLVNRIELKGIDFKEDGNILGHKLEYNYNSHNVYIMADKQKNGIKANFKIRHNIEDGSVQLADHYQQNTPIGDGPVLLPDNHYLSTQSALSKDPNEKRDHMVLLEFVTAAGITLGMDELYKHHHHHH

SEQ ID NO: 287 - DNA, 1667 bp, Artificial Sequence
  Description of Artificial Sequence: Synthetic polynucleotide
  Extended GFP39CTA
atgggccgcctggagagcaccccccccaagaagaagcgcaaggtggaggacagcgccagcgactacaaggacgacgacgacaaggtgagcaagggcgaggagctgttcaccggcgtggtgcccatcctggtggagctggacggcgacgtgaacggccacaagttcagcgtgagcggcgagggcgagggcgacgccaccctaggcaagctgaccctgaagttcatctgtaccaccggcaagctgcccgtgccctggcccaccctggtgaccaccctgacctacggcgtgcagtgtttcagccgctaccccgaccacatgaagcagcacgacttcttcaagagcgccatgcccgagggctacgtgcaggagcgcaccatcttcttcaaggacgacggcaactacaagacccgcgccgaggtgaagttcgagggcgacaccctggtgaaccgcatcgagctgaagggcatcgacttcaaggaggacggcaacatcctgggccacaagctggagtacaactacaacagccacaacgtgtacatcatggccgacaagcagaagaacggcatcaaggccaacttcaagatccgccacaacatcgaggacggcagcgtgcagctggccgaccactaccagcagaacacccccatcggcgacggccccgtgctgctgcccgacaaccactacctgagcacccagagcgccctgagcaaggaccccaacgagaagcgcgaccacatggtgctgctggagttcgtgaccgccgccggcatcaccctgggcatggacgagctgtacaagggagcaccaggaagtgctggttctgctgctggtagtggagtgagcaagggcgaggagctgttcaccggcgtggtgcccatcctggtggagctggacggcgacgtgaacggccacaagttcagcgtgagcggcgagggcgagggcgacgccacctatggcaagctgaccctgaagttcatctgtaccaccggcaagctgcccgtgccctggcccaccctggtgaccaccctgacctcgggcgtgcagtgtttcagccgctaccccgaccacatgaagcagcacgacttcttcaagagcgccatgcccgagggctacgtgcaggagcgcaccatcttcttcaaggacgacggcaactacaagacccgcgccgaggtgaagttcgagggcgacaccctggtgaaccgcatcgagctgaagggcatcgacttcaaggaggacggcaacatcctgggccacaagctggagtacaactacaacagccacaacgtgtacatcatggccgacaagcagaagaacggcatcaaggccaacttcaagatccgccacaacatcgaggacggcagcgtgcagctggccgaccactaccagcagaacacccccatcggcgacggccccgtgctgctgcccgacaaccactacctgagcacccagagcgccctgagcaaggaccccaacgagaagcgcgaccacatggtgctgctggagttcgtgaccgccgccggcatcaccctgggcatggacgagctgtacaagcatcaccatcaccatcactaagcggccgcatcgattataagctttgtacacctagaaaacatgaggatcacccatgtctgcacctcgacactagaaaacatgaggatcacccatgt

SEQ ID NO: 288 - protein, 523 aa, Artificial Sequence; identical to SEQ ID NO: 286
  Description of Artificial Sequence: Synthetic polypeptide
  Extended GFP39CTA
  MOD_RES (67)..(67): Any naturally occurring amino acid

SEQ ID NO: 289 - DNA, 25 bp, Artificial Sequence
  Description of Artificial Sequence: Synthetic oligonucleotide
  pp7 Bacteriophage PP7 RNA stem-loops: (version 1)
ggagcagacgatatggcgtcgctcc

SEQ ID NO: 290 - DNA, 25 bp, Artificial Sequence
  Description of Artificial Sequence: Synthetic oligonucleotide
  pp7 Bacteriophage PP7 RNA stem-loops: (version 2
ccagcagagcatatgggctcgctgg

SEQ ID NO: 291 - DNA, 639 bp, Homo sapiens
atggccatcacccagtttcggttatttaaattttgtacctgcctagcaacagtattctcattcctaaagagattaatatgcagatctggcagaggacggaaattaagtggagaccaaataactttgccaactacagttgattattcatcagttcctaagcagacagatgttgaagagtggacttcctgggatgaagatgcacccaccagtgtaaagatcgaaggagggaatgggaatgtggcaacacaacaaaattctttggaacaactggaacctgactattttaaggacatgacaccaactattaggaaaactcagaaaattgttattaagaagagagaaccattgaattttggcatcccagatgggagcacaggtttctctagtagattagcagctacacaagatctgccttttattcatcagtcttctgaattaggtgacttagatacctggcaggaaaataccaatgcatgggaagaagaagaagatgcagcctggcaagcagaagaagttctgagacagcagaaactagcagacagagaaaagagagcagccgaacaacaaaggaagaaaatggaaaaggaagcacaacggctaatgaagaaggaacaaaacaaaattggtgtgaaactttca

SEQ ID NO: 292 - protein, 213 aa, Artificial Sequence
  Description of Artificial Sequence: Synthetic polypeptide
MAITQFRLFKFCTCLATVFSFLKRLICRSGRGRKLSGDQITLPTTVDYSSVPKQTDVEEWTSWDEDAPTSVKIEGGNGNVATQQNSLEQLEPDYFKDMTPTIRKTQKIVIKKREPLNFGIPDGSTGFSSRLAATQDLPFIHQSSELGDLDTWQENTNAWEEEEDAAWQAEEVLRQQKLADREKRAAEQQRKKMEKEAQRLMKKEQNKIGVKLS

SEQ ID NO: 293 - DNA, 87 bp, Artificial Sequence
  Description of Artificial Sequence: Synthetic oligonucleotide
  EBAG91-29: Receptor-binding cancer antigen  fragment
atggccatcacccagtttcggttatttaaattttgtacctgcctagcaacagtattctcattcctaaagagattaatatgcagatct

SEQ ID NO: 294 - protein, 29 aa, Artificial Sequence
  Description of Artificial Sequence: Synthetic peptide
  EBAG91-29: Receptor-binding cancer antigen  fragment
MAITQFRLFKFCTCLATVFSFLKRLICRS

SEQ ID NO: 295 - DNA, 1011 bp, Homo sapiens
atggctgccccgagagacaatgtcactttattattcaagttatactgcttggcagtgatgaccctgatggctgcagtctataccatagctttaagatacacaaggacatcagacaaagaactctacttttcaacgacagccgtgtgtatcacagaagttataaagttattgctaagtgtgggaattttagctaaagaaactggtagtctgggtagattcaaagcatctttaagagaaaatgtcttggggagccccaaggaactgttgaagttaagtgtgccatcgttagtgtatgctgttcagaacaacatggctttcctagctcttagcaatctggatgcagcagtgtaccaggtgacctaccagttgaagattccgtgtactgctttatgcactgttttaatgttaaatcggacactcagcaaattacagtgggtttcagtttttatgctgtgtgctggagttacgcttgtacagtggaaaccagcccaagctacaaaagtggtggtggaacaaaatccattattagggtttggcgctatagctattgctgtattgtgctcaggatttgcaggagtatattttgaaaaagttttaaagagttcagatacttctctttgggtgagaaacattcaaatgtatctatcagggattattgtgacattagctggcgtctacttgtcagatggagctgaaattaaagaaaaaggatttttctatggttacacatattatgtctggtttgtcatctttcttgcaagtgttggtggcctctacacttctgttgtggttaagtacacagacaacatcatgaaaggcttttctgcagcagcggccattgtcctttccaccattgcttcagtaatgctgtttggattacagataacactcacctttgccctgggtactcttcttgtatgtgtttccatatatctctatggattacccagacaagacactacatccatccaacaaggagaaacagcttcaaaggagagagttattggtgtg

SEQ ID NO: 296 - protein, 337 aa, Homo sapiens
MAAPRDNVTLLFKLYCLAVMTLMAAVYTIALRYTRTSDKELYFSTTAVCITEVIKLLLSVGILAKETGSLGRFKASLRENVLGSPKELLKLSVPSLVYAVQNNMAFLALSNLDAAVYQVTYQLKIPCTALCTVLMLNRTLSKLQWVSVFMLCAGVTLVQWKPAQATKVVVEQNPLLGFGAIAIAVLCSGFAGVYFEKVLKSSDTSLWVRNIQMYLSGIIVTLAGVYLSDGAEIKEKGFFYGYTYYVWFVIFLASVGGLYTSVVVKYTDNIMKGFSAAAAIVLSTIASVMLFGLQITLTFALGTLLVCVSIYLYGLPRQDTTSIQQGETASKERVIGV

SEQ ID NO: 297 - DNA, 81 bp, Artificial Sequence
  Description of Artificial Sequence: Synthetic oligonucleotide
  P450 2C11-27: Cytochrome P450 2C1
atggaccccgtggtcgtgctgggcctgtgcctgtcatgcctgctgctgctgagcctgtggaagcagagctacggcggaggc

SEQ ID NO: 298 - protein, 27 aa, Artificial Sequence
  Description of Artificial Sequence: Synthetic peptide
  P450 2C11-27: Cytochrome P450 2C1
MDPVVVLGLCLSCLLLLSLWKQSYGGG

SEQ ID NO: 299 - DNA, 87 bp, Artificial Sequence
  Description of Artificial Sequence: Synthetic oligonucleotide
  P450 2C11-29: Cytochrome P450 2C1
atggaccccgtggtcgtgctgggcctgtgcctgtcatgcctgctgctgctgagcctgtggaagcagagctacggcggaggcaagctg

SEQ ID NO: 300 - protein, 29 aa, Artificial Sequence
  Description of Artificial Sequence: Synthetic peptide
  P450 2C11-29: Cytochrome P450 2C1
MDPVVVLGLCLSCLLLLSLWKQSYGGGKL

SEQ ID NO: 301 - DNA, 804 bp, Homo sapiens
atggcagtgaacgtatactcaacgtcagtgaccagtgataacctaagtcgacatgacatgctggcctggatcaatgagtctctgcagttgaatctgacaaagatcgaacagttgtgctcaggggctgcgtattgtcagtttatggacatgctgttccctggctccattgccttgaagaaagtgaaattccaagctaagctagaacacgagtacatccagaacttcaaaatactacaagcaggttttaagagaatgggtgttgacaaaataattcctgtggacaaattagtaaaaggaaagtttcaggacaattttgaattcgttcagtggttcaagaagtttttcgatgcaaactatgatggaaaagactatgaccctgtggctgccagacaaggtcaagaaactgcagtggctccttcccttgttgctccagctctgaataaaccgaagaaacctctcacttctagcagtgcagctccccagaggcccatctcaacacagagaaccgctgcggctcctaaggctggccctggtgtggtgcgaaagaaccctggtgtgggcaacggagatgacgaggcagctgagttgatgcagcaggtcaacgtattgaaacttactgttgaagacttggagaaagagagggatttctacttcggaaagctacggaacattgaattgatttgccaggagaacgagggggaaaacgaccctgtattgcagaggattgtagacattctgtatgccacagatgaaggctttgtgatacctgatgaagggggcccacaggaggagcaagaagagtat

SEQ ID NO: 302 - protein, 268 aa, Homo sapiens
MAVNVYSTSVTSDNLSRHDMLAWINESLQLNLTKIEQLCSGAAYCQFMDMLFPGSIALKKVKFQAKLEHEYIQNFKILQAGFKRMGVDKIIPVDKLVKGKFQDNFEFVQWFKKFFDANYDGKDYDPVAARQGQETAVAPSLVAPALNKPKKPLTSSSAAPQRPISTQRTAAAPKAGPGVVRKNPGVGNGDDEAAELMQQVNVLKLTVEDLEKERDFYFGKLRNIELICQENEGENDPVLQRIVDILYATDEGFVIPDEGGPQEEQEEY

SEQ ID NO: 303 - DNA, 1269 bp, Homo sapiens
atggccatttgtcaattcttccttcaaggccggtgccgctttggagatcggtgctggaacgaacatcccggtgctaggggtgcaggaggaggacggcagcaaccgcagcagcagccttcaggtaataatagacgtggatggaatacaactagccagagatattccaatgtcatccagccatccagtttctccaaatccacaccatgggggggcagcagagatcaagaaaagccatatttcagttcttttgattctggagcttcaactaacaggaaggaaggctttggattgtctgagaacccatttgcttcacttagtcctgatgagcagaaagatgaaaagaaacttctggaaggaattgtaaaagatatggaggtttgggaatcatcagggcagtggatgttttctgtttattcaccagtgaaaaagaaacctaatatttcaggttttacagacatttcaccagaggaattgaggcttgaataccataacttcttaaccagcaataacttacagagttatctaaattctgtccaacgtttaataaatcaatggaggaacagggtaaatgaactgaaaagtctaaatatatcaactaaagtagctttgctctctgatgtaaaggatggagtaaatcaagcagcacctgcatttggatttggcagcagtcaagcagcaacatttatgtcgccaggctttccagtcaataacagcagcagtgataatgctcagaactttagttttaaaacaaactctggatttgctgctgcctcttctggaagccctgctggttttgggagttccccagcatttggagctgcagcctctaccagttcaggtatctctacttctgctccagcttttggatttgggaagcctgaagtcacatcggctgcatcattttcattcaaaagccctgcagcttccagttttggatcacctggattttcaggacttccagcttccttggcaacaggtcctgtcagagctccagtggccccagcctttggaggtggcagttctgtggctggttttggtagtccgggctcacattctcacactgctttttctaagccatccagtgacacttttggaaatagcagcatatccacttctctgtcagcctcaagcagcatcattgcaacagataatgtgttattcacacccagagataaactaacagtagaagaactggaacaatttcaatccaagaaatttactctgggaaaaattccattaaagcctccacctctggaacttctaaatgtt

SEQ ID NO: 304 - protein, 423 aa, Homo sapiens
MAICQFFLQGRCRFGDRCWNEHPGARGAGGGRQQPQQQPSGNNRRGWNTTSQRYSNVIQPSSFSKSTPWGGSRDQEKPYFSSFDSGASTNRKEGFGLSENPFASLSPDEQKDEKKLLEGIVKDMEVWESSGQWMFSVYSPVKKKPNISGFTDISPEELRLEYHNFLTSNNLQSYLNSVQRLINQWRNRVNELKSLNISTKVALLSDVKDGVNQAAPAFGFGSSQAATFMSPGFPVNNSSSDNAQNFSFKTNSGFAAASSGSPAGFGSSPAFGAAASTSSGISTSAPAFGFGKPEVTSAASFSFKSPAASSFGSPGFSGLPASLATGPVRAPVAPAFGGGSSVAGFGSPGSHSHTAFSKPSSDTFGNSSISTSLSASSSIIATDNVLFTPRDKLTVEELEQFQSKKFTLGKIPLKPPPLELLNV

SEQ ID NO: 305 - DNA, 363 bp, Oryctolagus cuniculus
tccaaaaccatcgttctttcggtcggcgaggctactcgcactctgactgagatccagtccaccgcagaccgtcagatcttcgaagagaaggtcgggcctctggtgggtcggctgcgcctcacggcttcgctccgtcaaaacggagccaagaccgcgtatcgcgtcaacctaaaactggatcaggcggacgtcgttgattccggacttccgaaagtgcgctacactcaggtatggtcgcacgacgtgacaatcgttgcgaatagcaccgaggcctcgcgcaaatcgttgtacgatttgaccaagtccctcgtcgcgacctcgcaggtcgaagatcttgtcgtcaaccttgtgccgctgggccgt

SEQ ID NO: 306 - protein, 121 aa, Oryctolagus cuniculus
SKTIVLSVGEATRTLTEIQSTADRQIFEEKVGPLVGRLRLTASLRQNGAKTAYRVNLKLDQADVVDSGLPKVRYTQVWSHDVTIVANSTEASRKSLYDLTKSLVATSQVEDLVVNLVPLGR

SEQ ID NO: 307 - DNA, 504 bp, Caenorhabditis elegans
atggaaagcaaccagagcaacaacggcggctctggcaacgccgctctgaacagaggcggcagatacgtgcccccccacctgagaggaggcgacggcggcgccgccgccgctgcatctgccggcggagatgacagaagaggcggagccggaggcggcggctatagacggggaggcggaaacagcggcggcggaggcggaggcggctacgacagaggctacaacgacaaccgggacgaccgggacaacagaggcggcagcggcggatacggcagagatcgaaactacgaggacagaggctacaatggcggaggcggaggcggcggcaaccggggctacaacaacaacagaggaggcggcggcggcggctacaaccgccaggacagaggcgatggcggatctagcaatttcagcagaggcggctacaacaaccgggacgagggcagcgacaacagaggcagcggaagaagctacaacaatgaccggagagataatggcggagatggc

SEQ ID NO: 308 - protein, 168 aa, Caenorhabditis elegans
MESNQSNNGGSGNAALNRGGRYVPPHLRGGDGGAAAAASAGGDDRRGGAGGGGYRRGGGNSGGGGGGGYDRGYNDNRDDRDNRGGSGGYGRDRNYEDRGYNGGGGGGGNRGYNNNRGGGGGGYNRQDRGDGGSSNFSRGGYNNRDEGSDNRGSGRSYNNDRRDNGGDG

SEQ ID NO: 309 - DNA, 177 bp, Artificial Sequence
  Description of Artificial Sequence: Synthetic polynucleotide
  SLP3: Stomatin-like protein 3, aa 1-59
atggattctagggtgtcttcacctgagaagcaagataaagagaatttcgtgggtgtcaacaataaacggcttggtgtatgtggctggatcctgttttccctctctttcctgttggtgatcattaccttccccatctccatatggatgtgcttgaagatcattaaggagtatgaacgt

SEQ ID NO: 310 - protein, 59 aa, Artificial Sequence
  Description of Artificial Sequence: Synthetic polypeptide
  SLP3: Stomatin-like protein 3, aa 1-59
MDSRVSSPEKQDKENFVGVNNKRLGVCGWILFSLSFLLVIITFPISIWMCLKIIKEYER

SEQ ID NO: 311 - DNA, 141 bp, Artificial Sequence
  Description of Artificial Sequence: Synthetic polynucleotide
  SYNZIP1
aatctggtggcccagctggaaaacgaggtggccagcctggaaaacgagaacgaaaccctgaagaaaaagaacctgcacaagaaggacctgatcgcctacctggaaaaggaaatcgccaacctgagaaagaagatcgaggaa

SEQ ID NO: 312 - protein, 47 aa, Artificial Sequence
  Description of Artificial Sequence: Synthetic polypeptide
  SYNZIP1
NLVAQLENEVASLENENETLKKKNLHKKDLIAYLEKEIANLRKKIEE

SEQ ID NO: 313 - DNA, 150 bp, Artificial Sequence
  Description of Artificial Sequence: Synthetic polynucleotide
  SYNZIP2
gctagaaacgcctacctgagaaagaaaatcgccagactgaagaaggacaacctgcagctggaaagagacgagcagaacctggaaaagatcatcgccaacctcagagatgagatcgccagactggaaaacgaggtggccagccacgagcag

SEQ ID NO: 314 - protein, 50 aa, Artificial Sequence
  Description of Artificial Sequence: Synthetic polypeptide
  SYNZIP2
ARNAYLRKKIARLKKDNLQLERDEQNLEKIIANLRDEIARLENEVASHEQ

SEQ ID NO: 315 - DNA, 126 bp, Artificial Sequence
  Description of Artificial Sequence: Synthetic polynucleotide
  SYNZIP3
aatgaggtgaccaccctggaaaacgacgccgccttcatcgagaacgagaacgcctacctggaaaaagagatcgccagactgagaaaggaaaaggccgctctgcggaacagactggcccacaagaag

SEQ ID NO: 316 - protein, 42 aa, Artificial Sequence
  Description of Artificial Sequence: Synthetic polypeptide
  SYNZIP3
NEVTTLENDAAFIENENAYLEKEIARLRKEKAALRNRLAHKK

SEQ ID NO: 317 - DNA, 162 bp, Artificial Sequence
  Description of Artificial Sequence: Synthetic polynucleotide
  SYNZIP4
caaaaggtggctgaactgaaaaatagagtggccgtgaagctgaaccggaacgagcagctgaagaacaaggtggaagagctgaagaacagaaacgcctacctgaagaatgagctggccaccctggaaaacgaggtggccagactggaaaacgacgtggccgag

SEQ ID NO: 318 - protein, 54 aa, Artificial Sequence
  Description of Artificial Sequence: Synthetic polypeptide
  SYNZIP4
QKVAELKNRVAVKLNRNEQLKNKVEELKNRNAYLKNELATLENEVARLENDVAE

SEQ ID NO: 319 - DNA, 3051 bp, Artificial Sequence
  Description of Artificial Sequence: Synthetic polynucleotide
  EBAG91-29::FUS::PylRS(AF)
atggccatcacccagtttcggttatttaaattttgtacctgcctagcaacagtattctcattcctaaagagattaatatgcagatctggagcacccggctccgccggctccgccgccggctccggcatggcctcaaacgattatacccaacaagcaacccaaagctatggggcctaccccacccagcccgggcagggctattcccagcagagcagtcagccctacggacagcagagttacagtggttatagccagtccacggacacttcaggatatggccagagcagctattcttcttatggccagagccagaacacaggctatggaactcagtcaactccccagggatatggctcgactggcggctatggcagtagccagagctcccaatcgtcttacgggcagcagtcctcctaccctggctatggccagcagccagctcccagcagcacctcgggaagttacggtagcagttctcagagcagcagctatgggcagccccagagtgggagctacagccagcagcctagctatggtggacagcagcaaagctatggacagcagcaaagctataatccccctcagggctatggacagcagaaccagtacaacagcagcagtggtggtggaggtggaggtggaggtggaggtaactatggccaagatcaatcctccatgagtagtggtggtggcagtggtggcggttatggcaatcaagaccagagtggtggaggtggcagcggtggctatggacagcaggaccgtggaggccgcggcaggggtggcagtggtggcggcggcggcggcggcggtggtggttacaaccgcagcagtggtggctatgaacccagaggtcgtggaggtggccgtggaggcagaggtggcatgggcggaagtgaccgtggtggcttcaataaatttggtggccctcgggaccaaggatcacgtcatgactccgaacaggataattcagacaacaacaccatctttgtgcaaggcctgggtgagaatgttacaattgagtctgtggctgattacttcaagcagattggtattattaagacaaacaagaaaacgggacagcccatgattaatttgtacacagacagggaaactggcaagctgaagggagaggcaacggtctcttttgatgacccaccttcagctaaagcagctattgactggtttgatggtaaagaattctccggaaatcctatcaaggtctcatttgctactcgccgggcagactttaatcggggtggtggcaatggtcgtggaggccgagggcgaggaggacccatgggccgtggaggctatggaggtggtggcagtggtggtggtggccgaggaggatttcccagtggaggtggtggcggtggaggacagcagcgagctggtgactggaagtgtcctaatcccacctgtgagaatatgaacttctcttggaggaatgaatgcaaccagtgtaaggcccctaaaccagatggcccaggagggggaccaggtggctctcacatggggggtaactacggggatgatcgtcgtggtggcagaggtggtgcgatcgcaggcgccgattacaaggacgatgatgacaagggagcaccaggaagtgctggttctgctgctggtagtggagcgtgcccggtgccgctgcagctgccgccgctggaacgcctgaccctggatgataaaaaaccgctgaataccctgatctctgctactggtctgtggatgagtcgtaccggaaccattcataaaatcaaacaccacgaggttagccgttcgaaaatctatattgagatggcgtgtggcgatcatctggttgtgaacaatagccgctcttctcgtacagcacgtgcactgcgtcaccacaaatatcgtaaaacctgtaaacgttgccgtgtgtccgatgaggatctgaacaaattcctgacaaaagccaatgaggaccaaacaagcgtgaaagtgaaagtcgttagcgctcctacccgtactaaaaaagcaatgccgaaatccgttgctcgtgcccctaaaccactggaaaacactgaagcagcacaggcacagccgtctggaagcaaattctctccggccattcctgtttctacccaggagtccgtttctgttccagcaagtgtgagcaccagcattagcagtattagcaccggtgccaccgctagcgccctggttaaaggcaataccaatccgattacaagcatgtctgccccggttcaagcatcagctccagcactgacaaaatcccaaaccgatcgtctggaggttctgctgaatccgaaagacgaaatcagcctgaattccggcaaaccgtttcgtgaactggagagcgaactgctgtcacgtcgtaaaaaagacctgcaacaaatctatgccgaagaacgtgagaactatctggggaaactggaacgtgaaatcacccgctttttcgtggatcgtggctttctggagatcaaatccccgattctgattcctctggagtatatcgagcgtatgggcatcgacaatgataccgaactgagcaaacaaattttccgtgtggataaaaacttctgtctgcgccctatgctagcaccaaatctggctaactatctgcgcaaactggaccgtgccctgcctgatcctatcaaaatcttcgagatcggcccgtgttatcgtaaagagtccgacggtaaagaacatctggaggagtttaccatgctgaacttttgccaaatgggttcaggttgtactcgtgagaacctggaaagcatcatcaccgattttctgaaccacctgggcattgacttcaaaattgtgggcgacagctgtatggtgtttggcgacaccctggatgtcatgcacggcgacctggaactgtctagtgccgttgtgggcccaatcccgctggatcgtgagtggggtatcgacaaaccttggatcggtgcgggttttggtctggagcgtctgctgaaagtaaaacacgacttcaagaacatcaaacgtgctgcacgttccgagtcctattacaatggtatttctactaacctgtaa

SEQ ID NO: 320 - protein, 1016 aa, Artificial Sequence
  Description of Artificial Sequence: Synthetic polypeptide
  EBAG91-29::FUS::PylRS(AF)
MAITQFRLFKFCTCLATVFSFLKRLICRSGAPGSAGSAAGSGMASNDYTQQATQSYGAYPTQPGQGYSQQSSQPYGQQSYSGYSQSTDTSGYGQSSYSSYGQSQNTGYGTQSTPQGYGSTGGYGSSQSSQSSYGQQSSYPGYGQQPAPSSTSGSYGSSSQSSSYGQPQSGSYSQQPSYGGQQQSYGQQQSYNPPQGYGQQNQYNSSSGGGGGGGGGGNYGQDQSSMSSGGGSGGGYGNQDQSGGGGSGGYGQQDRGGRGRGGSGGGGGGGGGGYNRSSGGYEPRGRGGGRGGRGGMGGSDRGGFNKFGGPRDQGSRHDSEQDNSDNNTIFVQGLGENVTIESVADYFKQIGIIKTNKKTGQPMINLYTDRETGKLKGEATVSFDDPPSAKAAIDWFDGKEFSGNPIKVSFATRRADFNRGGGNGRGGRGRGGPMGRGGYGGGGSGGGGRGGFPSGGGGGGGQQRAGDWKCPNPTCENMNFSWRNECNQCKAPKPDGPGGGPGGSHMGGNYGDDRRGGRGGAIAGADYKDDDDKGAPGSAGSAAGSGACPVPLQLPPLERLTLDDKKPLNTLISATGLWMSRTGTIHKIKHHEVSRSKIYIEMACGDHLVVNNSRSSRTARALRHHKYRKTCKRCRVSDEDLNKFLTKANEDQTSVKVKVVSAPTRTKKAMPKSVARAPKPLENTEAAQAQPSGSKFSPAIPVSTQESVSVPASVSTSISSISTGATASALVKGNTNPITSMSAPVQASAPALTKSQTDRLEVLLNPKDEISLNSGKPFRELESELLSRRKKDLQQIYAEERENYLGKLEREITRFFVDRGFLEIKSPILIPLEYIERMGIDNDTELSKQIFRVDKNFCLRPMLAPNLANYLRKLDRALPDPIKIFEIGPCYRKESDGKEHLEEFTMLNFCQMGSGCTRENLESIITDFLNHLGIDFKIVGDSCMVFGDTLDVMHGDLELSSAVVGPIPLDREWGIDKPWIGAGFGLERLLKVKHDFKNIKRAARSESYYNGISTNL

SEQ ID NO: 321 - DNA, 2121 bp, Artificial Sequence
  Description of Artificial Sequence: Synthetic polynucleotide
  EBAG9::PylRS(AF)
atggccatcacccagtttcggttatttaaattttgtacctgcctagcaacagtattctcattcctaaagagattaatatgcagatctggcagaggacggaaattaagtggagaccaaataactttgccaactacagttgattattcatcagttcctaagcagacagatgttgaagagtggacttcctgggatgaagatgcacccaccagtgtaaagatcgaaggagggaatgggaatgtggcaacacaacaaaattctttggaacaactggaacctgactattttaaggacatgacaccaactattaggaaaactcagaaaattgttattaagaagagagaaccattgaattttggcatcccagatgggagcacaggtttctctagtagattagcagctacacaagatctgccttttattcatcagtcttctgaattaggtgacttagatacctggcaggaaaataccaatgcatgggaagaagaagaagatgcagcctggcaagcagaagaagttctgagacagcagaaactagcagacagagaaaagagagcagccgaacaacaaaggaagaaaatggaaaaggaagcacaacggctaatgaagaaggaacaaaacaaaattggtgtgaaactttcaggcgccgattacaaggacgatgatgacaagggagcaccaggaagtgctggttctgctgctggtagtggagcgtgcccggtgccgctgcagctgccgccgctggaacgcctgaccctggatgataaaaaaccgctgaataccctgatctctgctactggtctgtggatgagtcgtaccggaaccattcataaaatcaaacaccacgaggttagccgttcgaaaatctatattgagatggcgtgtggcgatcatctggttgtgaacaatagccgctcttctcgtacagcacgtgcactgcgtcaccacaaatatcgtaaaacctgtaaacgttgccgtgtgtccgatgaggatctgaacaaattcctgacaaaagccaatgaggaccaaacaagcgtgaaagtgaaagtcgttagcgctcctacccgtactaaaaaagcaatgccgaaatccgttgctcgtgcccctaaaccactggaaaacactgaagcagcacaggcacagccgtctggaagcaaattctctccggccattcctgtttctacccaggagtccgtttctgttccagcaagtgtgagcaccagcattagcagtattagcaccggtgccaccgctagcgccctggttaaaggcaataccaatccgattacaagcatgtctgccccggttcaagcatcagctccagcactgacaaaatcccaaaccgatcgtctggaggttctgctgaatccgaaagacgaaatcagcctgaattccggcaaaccgtttcgtgaactggagagcgaactgctgtcacgtcgtaaaaaagacctgcaacaaatctatgccgaagaacgtgagaactatctggggaaactggaacgtgaaatcacccgctttttcgtggatcgtggctttctggagatcaaatccccgattctgattcctctggagtatatcgagcgtatgggcatcgacaatgataccgaactgagcaaacaaattttccgtgtggataaaaacttctgtctgcgccctatgctagcaccaaatctggctaactatctgcgcaaactggaccgtgccctgcctgatcctatcaaaatcttcgagatcggcccgtgttatcgtaaagagtccgacggtaaagaacatctggaggagtttaccatgctgaacttttgccaaatgggttcaggttgtactcgtgagaacctggaaagcatcatcaccgattttctgaaccacctgggcattgacttcaaaattgtgggcgacagctgtatggtgtttggcgacaccctggatgtcatgcacggcgacctggaactgtctagtgccgttgtgggcccaatcccgctggatcgtgagtggggtatcgacaaaccttggatcggtgcgggttttggtctggagcgtctgctgaaagtaaaacacgacttcaagaacatcaaacgtgctgcacgttccgagtcctattacaatggtatttctactaacctgtaa

SEQ ID NO: 322 - protein, 706 aa, Artificial Sequence
  Description of Artificial Sequence: Synthetic polypeptide
  EBAG9::PylRS(AF)
MAITQFRLFKFCTCLATVFSFLKRLICRSGRGRKLSGDQITLPTTVDYSSVPKQTDVEEWTSWDEDAPTSVKIEGGNGNVATQQNSLEQLEPDYFKDMTPTIRKTQKIVIKKREPLNFGIPDGSTGFSSRLAATQDLPFIHQSSELGDLDTWQENTNAWEEEEDAAWQAEEVLRQQKLADREKRAAEQQRKKMEKEAQRLMKKEQNKIGVKLSGADYKDDDDKGAPGSAGSAAGSGACPVPLQLPPLERLTLDDKKPLNTLISATGLWMSRTGTIHKIKHHEVSRSKIYIEMACGDHLVVNNSRSSRTARALRHHKYRKTCKRCRVSDEDLNKFLTKANEDQTSVKVKVVSAPTRTKKAMPKSVARAPKPLENTEAAQAQPSGSKFSPAIPVSTQESVSVPASVSTSISSISTGATASALVKGNTNPITSMSAPVQASAPALTKSQTDRLEVLLNPKDEISLNSGKPFRELESELLSRRKKDLQQIYAEERENYLGKLEREITRFFVDRGFLEIKSPILIPLEYIERMGIDNDTELSKQIFRVDKNFCLRPMLAPNLANYLRKLDRALPDPIKIFEIGPCYRKESDGKEHLEEFTMLNFCQMGSGCTRENLESIITDFLNHLGIDFKIVGDSCMVFGDTLDVMHGDLELSSAVVGPIPLDREWGIDKPWIGAGFGLERLLKVKHDFKNIKRAARSESYYNGISTNL

SEQ ID NO: 323 - DNA, 3603 bp, Artificial Sequence
  Description of Artificial Sequence: Synthetic polynucleotide
  EBAG9::FUS::PylRS(AF)
atggccatcacccagtttcggttatttaaattttgtacctgcctagcaacagtattctcattcctaaagagattaatatgcagatctggcagaggacggaaattaagtggagaccaaataactttgccaactacagttgattattcatcagttcctaagcagacagatgttgaagagtggacttcctgggatgaagatgcacccaccagtgtaaagatcgaaggagggaatgggaatgtggcaacacaacaaaattctttggaacaactggaacctgactattttaaggacatgacaccaactattaggaaaactcagaaaattgttattaagaagagagaaccattgaattttggcatcccagatgggagcacaggtttctctagtagattagcagctacacaagatctgccttttattcatcagtcttctgaattaggtgacttagatacctggcaggaaaataccaatgcatgggaagaagaagaagatgcagcctggcaagcagaagaagttctgagacagcagaaactagcagacagagaaaagagagcagccgaacaacaaaggaagaaaatggaaaaggaagcacaacggctaatgaagaaggaacaaaacaaaattggtgtgaaactttcaggagcacccggctccgccggctccgccgccggctccggcatggcctcaaacgattatacccaacaagcaacccaaagctatggggcctaccccacccagcccgggcagggctattcccagcagagcagtcagccctacggacagcagagttacagtggttatagccagtccacggacacttcaggatatggccagagcagctattcttcttatggccagagccagaacacaggctatggaactcagtcaactccccagggatatggctcgactggcggctatggcagtagccagagctcccaatcgtcttacgggcagcagtcctcctaccctggctatggccagcagccagctcccagcagcacctcgggaagttacggtagcagttctcagagcagcagctatgggcagccccagagtgggagctacagccagcagcctagctatggtggacagcagcaaagctatggacagcagcaaagctataatccccctcagggctatggacagcagaaccagtacaacagcagcagtggtggtggaggtggaggtggaggtggaggtaactatggccaagatcaatcctccatgagtagtggtggtggcagtggtggcggttatggcaatcaagaccagagtggtggaggtggcagcggtggctatggacagcaggaccgtggaggccgcggcaggggtggcagtggtggcggcggcggcggcggcggtggtggttacaaccgcagcagtggtggctatgaacccagaggtcgtggaggtggccgtggaggcagaggtggcatgggcggaagtgaccgtggtggcttcaataaatttggtggccctcgggaccaaggatcacgtcatgactccgaacaggataattcagacaacaacaccatctttgtgcaaggcctgggtgagaatgttacaattgagtctgtggctgattacttcaagcagattggtattattaagacaaacaagaaaacgggacagcccatgattaatttgtacacagacagggaaactggcaagctgaagggagaggcaacggtctcttttgatgacccaccttcagctaaagcagctattgactggtttgatggtaaagaattctccggaaatcctatcaaggtctcatttgctactcgccgggcagactttaatcggggtggtggcaatggtcgtggaggccgagggcgaggaggacccatgggccgtggaggctatggaggtggtggcagtggtggtggtggccgaggaggatttcccagtggaggtggtggcggtggaggacagcagcgagctggtgactggaagtgtcctaatcccacctgtgagaatatgaacttctcttggaggaatgaatgcaaccagtgtaaggcccctaaaccagatggcccaggagggggaccaggtggctctcacatggggggtaactacggggatgatcgtcgtggtggcagaggtggtgcgatcgcaggcgccgattacaaggacgatgatgacaagggagcaccaggaagtgctggttctgctgctggtagtggagcgtgcccggtgccgctgcagctgccgccgctggaacgcctgaccctggatgataaaaaaccgctgaataccctgatctctgctactggtctgtggatgagtcgtaccggaaccattcataaaatcaaacaccacgaggttagccgttcgaaaatctatattgagatggcgtgtggcgatcatctggttgtgaacaatagccgctcttctcgtacagcacgtgcactgcgtcaccacaaatatcgtaaaacctgtaaacgttgccgtgtgtccgatgaggatctgaacaaattcctgacaaaagccaatgaggaccaaacaagcgtgaaagtgaaagtcgttagcgctcctacccgtactaaaaaagcaatgccgaaatccgttgctcgtgcccctaaaccactggaaaacactgaagcagcacaggcacagccgtctggaagcaaattctctccggccattcctgtttctacccaggagtccgtttctgttccagcaagtgtgagcaccagcattagcagtattagcaccggtgccaccgctagcgccctggttaaaggcaataccaatccgattacaagcatgtctgccccggttcaagcatcagctccagcactgacaaaatcccaaaccgatcgtctggaggttctgctgaatccgaaagacgaaatcagcctgaattccggcaaaccgtttcgtgaactggagagcgaactgctgtcacgtcgtaaaaaagacctgcaacaaatctatgccgaagaacgtgagaactatctggggaaactggaacgtgaaatcacccgctttttcgtggatcgtggctttctggagatcaaatccccgattctgattcctctggagtatatcgagcgtatgggcatcgacaatgataccgaactgagcaaacaaattttccgtgtggataaaaacttctgtctgcgccctatgctagcaccaaatctggctaactatctgcgcaaactggaccgtgccctgcctgatcctatcaaaatcttcgagatcggcccgtgttatcgtaaagagtccgacggtaaagaacatctggaggagtttaccatgctgaacttttgccaaatgggttcaggttgtactcgtgagaacctggaaagcatcatcaccgattttctgaaccacctgggcattgacttcaaaattgtgggcgacagctgtatggtgtttggcgacaccctggatgtcatgcacggcgacctggaactgtctagtgccgttgtgggcccaatcccgctggatcgtgagtggggtatcgacaaaccttggatcggtgcgggttttggtctggagcgtctgctgaaagtaaaacacgacttcaagaacatcaaacgtgctgcacgttccgagtcctattacaatggtatttctactaacctgtaa

SEQ ID NO: 324 - protein, 1200 aa, Artificial Sequence
  Description of Artificial Sequence: Synthetic polypeptide
  EBAG9::FUS::PylRS(AF)
MAITQFRLFKFCTCLATVFSFLKRLICRSGRGRKLSGDQITLPTTVDYSSVPKQTDVEEWTSWDEDAPTSVKIEGGNGNVATQQNSLEQLEPDYFKDMTPTIRKTQKIVIKKREPLNFGIPDGSTGFSSRLAATQDLPFIHQSSELGDLDTWQENTNAWEEEEDAAWQAEEVLRQQKLADREKRAAEQQRKKMEKEAQRLMKKEQNKIGVKLSGAPGSAGSAAGSGMASNDYTQQATQSYGAYPTQPGQGYSQQSSQPYGQQSYSGYSQSTDTSGYGQSSYSSYGQSQNTGYGTQSTPQGYGSTGGYGSSQSSQSSYGQQSSYPGYGQQPAPSSTSGSYGSSSQSSSYGQPQSGSYSQQPSYGGQQQSYGQQQSYNPPQGYGQQNQYNSSSGGGGGGGGGGNYGQDQSSMSSGGGSGGGYGNQDQSGGGGSGGYGQQDRGGRGRGGSGGGGGGGGGGYNRSSGGYEPRGRGGGRGGRGGMGGSDRGGFNKFGGPRDQGSRHDSEQDNSDNNTIFVQGLGENVTIESVADYFKQIGIIKTNKKTGQPMINLYTDRETGKLKGEATVSFDDPPSAKAAIDWFDGKEFSGNPIKVSFATRRADFNRGGGNGRGGRGRGGPMGRGGYGGGGSGGGGRGGFPSGGGGGGGQQRAGDWKCPNPTCENMNFSWRNECNQCKAPKPDGPGGGPGGSHMGGNYGDDRRGGRGGAIAGADYKDDDDKGAPGSAGSAAGSGACPVPLQLPPLERLTLDDKKPLNTLISATGLWMSRTGTIHKIKHHEVSRSKIYIEMACGDHLVVNNSRSSRTARALRHHKYRKTCKRCRVSDEDLNKFLTKANEDQTSVKVKVVSAPTRTKKAMPKSVARAPKPLENTEAAQAQPSGSKFSPAIPVSTQESVSVPASVSTSISSISTGATASALVKGNTNPITSMSAPVQASAPALTKSQTDRLEVLLNPKDEISLNSGKPFRELESELLSRRKKDLQQIYAEERENYLGKLEREITRFFVDRGFLEIKSPILIPLEYIERMGIDNDTELSKQIFRVDKNFCLRPMLAPNLANYLRKLDRALPDPIKIFEIGPCYRKESDGKEHLEEFTMLNFCQMGSGCTRENLESIITDFLNHLGIDFKIVGDSCMVFGDTLDVMHGDLELSSAVVGPIPLDREWGIDKPWIGAGFGLERLLKVKHDFKNIKRAARSESYYNGISTNL

SEQ ID NO: 325 - DNA, 1065 bp, Artificial Sequence
  Description of Artificial Sequence: Synthetic polynucleotide
  EBAG9::MCP
atggccatcacccagtttcggttatttaaattttgtacctgcctagcaacagtattctcattcctaaagagattaatatgcagatctggcagaggacggaaattaagtggagaccaaataactttgccaactacagttgattattcatcagttcctaagcagacagatgttgaagagtggacttcctgggatgaagatgcacccaccagtgtaaagatcgaaggagggaatgggaatgtggcaacacaacaaaattctttggaacaactggaacctgactattttaaggacatgacaccaactattaggaaaactcagaaaattgttattaagaagagagaaccattgaattttggcatcccagatgggagcacaggtttctctagtagattagcagctacacaagatctgccttttattcatcagtcttctgaattaggtgacttagatacctggcaggaaaataccaatgcatgggaagaagaagaagatgcagcctggcaagcagaagaagttctgagacagcagaaactagcagacagagaaaagagagcagccgaacaacaaaggaagaaaatggaaaaggaagcacaacggctaatgaagaaggaacaaaacaaaattggtgtgaaactttcagcgatcgcatatccctatgatgtgccggattatgctggagcaccaggaagtgctggttctgctgctggtagtggagcttctaactttactcagttcgttctcgtcgacaatggcggaactggcgacgtgactgtcgccccaagcaacttcgctaacgggatcgctgaatggatcagctctaactcgcgttcacaggcttacaaagtaacctgtagcgttcgtcagagctctgcgcagaatcgcaaatacaccatcaaagtcgaggtgcctaaaggcgcctggcgttcgtacttaaatatggaactaaccattccaattttcgccacgaattccgactgcgagcttattgttaaggcaatgcaaggtctcctaaaagatggaaacccgattccctcagcaatcgcagcaaactccggcatctactaa

SEQ ID NO: 326 - protein, 354 aa, Artificial Sequence
  Description of Artificial Sequence: Synthetic polypeptide
  EBAG9::MCP
MAITQFRLFKFCTCLATVFSFLKRLICRSGRGRKLSGDQITLPTTVDYSSVPKQTDVEEWTSWDEDAPTSVKIEGGNGNVATQQNSLEQLEPDYFKDMTPTIRKTQKIVIKKREPLNFGIPDGSTGFSSRLAATQDLPFIHQSSELGDLDTWQENTNAWEEEEDAAWQAEEVLRQQKLADREKRAAEQQRKKMEKEAQRLMKKEQNKIGVKLSAIAYPYDVPDYAGAPGSAGSAAGSGASNFTQFVLVDNGGTGDVTVAPSNFANGIAEWISSNSRSQAYKVTCSVRQSSAQNRKYTIKVEVPKGAWRSYLNMELTIPIFATNSDCELIVKAMQGLLKDGNPIPSAIAANSGIY

SEQ ID NO: 327 - DNA, 2949 bp, Artificial Sequence
  Description of Artificial Sequence: Synthetic polynucleotide
  EBAG9::EWSR1::MCP
atggccatcacccagtttcggttatttaaattttgtacctgcctagcaacagtattctcattcctaaagagattaatatgcagatctggcagaggacggaaattaagtggagaccaaataactttgccaactacagttgattattcatcagttcctaagcagacagatgttgaagagtggacttcctgggatgaagatgcacccaccagtgtaaagatcgaaggagggaatgggaatgtggcaacacaacaaaattctttggaacaactggaacctgactattttaaggacatgacaccaactattaggaaaactcagaaaattgttattaagaagagagaaccattgaattttggcatcccagatgggagcacaggtttctctagtagattagcagctacacaagatctgccttttattcatcagtcttctgaattaggtgacttagatacctggcaggaaaataccaatgcatgggaagaagaagaagatgcagcctggcaagcagaagaagttctgagacagcagaaactagcagacagagaaaagagagcagccgaacaacaaaggaagaaaatggaaaaggaagcacaacggctaatgaagaaggaacaaaacaaaattggtgtgaaactttcaatggcgtccacggattacagtacctatagccaagctgcagcgcagcagggctacagtgcttacaccgcccagcccactcaaggatatgcacagaccacccaggcatatgggcaacaaagctatggaacctatggacagcccactgatgtcagctatacccaggctcagaccactgcaacctatgggcagaccgcctatgcaacttcttatggacagcctcccactggttatactactccaactgccccccaggcatacagccagcctgtccaggggtatggcactggtgcttatgataccaccactgctacagtcaccaccacccaggcctcctatgcagctcagtctgcatatggcactcagcctgcttatccagcctatgggcagcagccagcagccactgcacctacaagaccgcaggatggaaacaagcccactgagactagtcaacctcaatctagcacagggggttacaaccagcccagcctaggatatggacagagtaactacagttatccccaggtacctgggagctaccccatgcagccagtcactgcacctccatcctaccctcctaccagctattcctctacacagccgactagttatgatcagagcagttactctcagcagaacacctatgggcaaccgagcagctatggacagcagagtagctatggtcaacaaagcagctatgggcagcagcctcccactagttacccaccccaaactggatcctacagccaagctccaagtcaatatagccaacagagcagcagctacgggcagcagagttcattccgacaggaccaccccagtagcatgggtgtttatgggcaggagtctggaggattttccggaccaggagagaaccggagcatgagtggccctgataaccggggcaggggaagagggggatttgatcgtggaggcatgagcagaggtgggcggggaggaggacgcggtggaatgggcagcgctggagagcgaggtggcttcaataagcctggtggacccatggatgaaggaccagatcttgatctaggcccacctgtagatccagatgaagactctgacaacagtgcaatttatgtacaaggattaaatgacagtgtgactctagatgatctggcagacttctttaagcagtgtggggttgttaagatgaacaagagaactgggcaacccatgatccacatctacctggacaaggaaacaggaaagcccaaaggcgatgccacagtgtcctatgaagacccacctactgccaaggctgccgtggaatggtttgatgggaaagattttcaagggagcaaacttaaagtctcccttgctcggaagaagcctccaatgaacagtatgcggggtggtctgccaccccgtgagggcagaggcatgccaccaccactccgtggaggtccaggaggcccaggaggtcctgggggacccatgggtcgcatgggaggccgtggaggagatagaggaggcttccctccaagaggaccccggggttcccgagggaacccctctggaggaggaaacgtccagcaccgagctggagactggcagtgtcccaatccgggttgtggaaaccagaacttcgcctggagaacagagtgcaaccagtgtaaggccccaaagcctgaaggcttcctcccgccaccctttccgcccccgggtggtgatcgtggcagaggtggccctggtggcatgcggggaggaagaggtggcctcatggatcgtggtggtcccggtggaatgttcagaggtggccgtggtggagacagaggtggcttccgtggtggccggggcatggaccgaggtggctttggtggaggaagacgaggtggccctggggggccccctggacctttgatggaacaggcgatcgcatatccctatgatgtgccggattatgctggagcaccaggaagtgctggttctgctgctggtagtggagcttctaactttactcagttcgttctcgtcgacaatggcggaactggcgacgtgactgtcgccccaagcaacttcgctaacgggatcgctgaatggatcagctctaactcgcgttcacaggcttacaaagtaacctgtagcgttcgtcagagctctgcgcagaatcgcaaatacaccatcaaagtcgaggtgcctaaaggcgcctggcgttcgtacttaaatatggaactaaccattccaattttcgccacgaattccgactgcgagcttattgttaaggcaatgcaaggtctcctaaaagatggaaacccgattccctcagcaatcgcagcaaactccggcatctactaa

SEQ ID NO: 328 - protein, 982 aa, Artificial Sequence
  Description of Artificial Sequence: Synthetic polypeptide
  EBAG9::EWSR1::MCP
MAITQFRLFKFCTCLATVFSFLKRLICRSGRGRKLSGDQITLPTTVDYSSVPKQTDVEEWTSWDEDAPTSVKIEGGNGNVATQQNSLEQLEPDYFKDMTPTIRKTQKIVIKKREPLNFGIPDGSTGFSSRLAATQDLPFIHQSSELGDLDTWQENTNAWEEEEDAAWQAEEVLRQQKLADREKRAAEQQRKKMEKEAQRLMKKEQNKIGVKLSMASTDYSTYSQAAAQQGYSAYTAQPTQGYAQTTQAYGQQSYGTYGQPTDVSYTQAQTTATYGQTAYATSYGQPPTGYTTPTAPQAYSQPVQGYGTGAYDTTTATVTTTQASYAAQSAYGTQPAYPAYGQQPAATAPTRPQDGNKPTETSQPQSSTGGYNQPSLGYGQSNYSYPQVPGSYPMQPVTAPPSYPPTSYSSTQPTSYDQSSYSQQNTYGQPSSYGQQSSYGQQSSYGQQPPTSYPPQTGSYSQAPSQYSQQSSSYGQQSSFRQDHPSSMGVYGQESGGFSGPGENRSMSGPDNRGRGRGGFDRGGMSRGGRGGGRGGMGSAGERGGFNKPGGPMDEGPDLDLGPPVDPDEDSDNSAIYVQGLNDSVTLDDLADFFKQCGVVKMNKRTGQPMIHIYLDKETGKPKGDATVSYEDPPTAKAAVEWFDGKDFQGSKLKVSLARKKPPMNSMRGGLPPREGRGMPPPLRGGPGGPGGPGGPMGRMGGRGGDRGGFPPRGPRGSRGNPSGGGNVQHRAGDWQCPNPGCGNQNFAWRTECNQCKAPKPEGFLPPPFPPPGGDRGRGGPGGMRGGRGGLMDRGGPGGMFRGGRGGDRGGFRGGRGMDRGGFGGGRRGGPGGPPGPLMEQAIAYPYDVPDYAGAPGSAGSAAGSGASNFTQFVLVDNGGTGDVTVAPSNFANGIAEWISSNSRSQAYKVTCSVRQSSAQNRKYTIKVEVPKGAWRSYLNMELTIPIFATNSDCELIVKAMQGLLKDGNPIPSAIAANSGIY

SEQ ID NO: 329 - DNA, 1569 bp, Artificial Sequence
  Description of Artificial Sequence: Synthetic polynucleotide
  EBAG91-29::PylRS(AF)
atggccatcacccagtttcggttatttaaattttgtacctgcctagcaacagtattctcattcctaaagagattaatatgcagatctggcgccgattacaaggacgatgatgacaagggagcaccaggaagtgctggttctgctgctggtagtggagcgtgcccggtgccgctgcagctgccgccgctggaacgcctgaccctggatgataaaaaaccgctgaataccctgatctctgctactggtctgtggatgagtcgtaccggaaccattcataaaatcaaacaccacgaggttagccgttcgaaaatctatattgagatggcgtgtggcgatcatctggttgtgaacaatagccgctcttctcgtacagcacgtgcactgcgtcaccacaaatatcgtaaaacctgtaaacgttgccgtgtgtccgatgaggatctgaacaaattcctgacaaaagccaatgaggaccaaacaagcgtgaaagtgaaagtcgttagcgctcctacccgtactaaaaaagcaatgccgaaatccgttgctcgtgcccctaaaccactggaaaacactgaagcagcacaggcacagccgtctggaagcaaattctctccggccattcctgtttctacccaggagtccgtttctgttccagcaagtgtgagcaccagcattagcagtattagcaccggtgccaccgctagcgccctggttaaaggcaataccaatccgattacaagcatgtctgccccggttcaagcatcagctccagcactgacaaaatcccaaaccgatcgtctggaggttctgctgaatccgaaagacgaaatcagcctgaattccggcaaaccgtttcgtgaactggagagcgaactgctgtcacgtcgtaaaaaagacctgcaacaaatctatgccgaagaacgtgagaactatctggggaaactggaacgtgaaatcacccgctttttcgtggatcgtggctttctggagatcaaatccccgattctgattcctctggagtatatcgagcgtatgggcatcgacaatgataccgaactgagcaaacaaattttccgtgtggataaaaacttctgtctgcgccctatgctagcaccaaatctggctaactatctgcgcaaactggaccgtgccctgcctgatcctatcaaaatcttcgagatcggcccgtgttatcgtaaagagtccgacggtaaagaacatctggaggagtttaccatgctgaacttttgccaaatgggttcaggttgtactcgtgagaacctggaaagcatcatcaccgattttctgaaccacctgggcattgacttcaaaattgtgggcgacagctgtatggtgtttggcgacaccctggatgtcatgcacggcgacctggaactgtctagtgccgttgtgggcccaatcccgctggatcgtgagtggggtatcgacaaaccttggatcggtgcgggttttggtctggagcgtctgctgaaagtaaaacacgacttcaagaacatcaaacgtgctgcacgttccgagtcctattacaatggtatttctactaacctgtaa

SEQ ID NO: 330 - protein, 522 aa, Artificial Sequence
  Description of Artificial Sequence: Synthetic polypeptide
  EBAG91-29::PylRS(AF)
MAITQFRLFKFCTCLATVFSFLKRLICRSGADYKDDDDKGAPGSAGSAAGSGACPVPLQLPPLERLTLDDKKPLNTLISATGLWMSRTGTIHKIKHHEVSRSKIYIEMACGDHLVVNNSRSSRTARALRHHKYRKTCKRCRVSDEDLNKFLTKANEDQTSVKVKVVSAPTRTKKAMPKSVARAPKPLENTEAAQAQPSGSKFSPAIPVSTQESVSVPASVSTSISSISTGATASALVKGNTNPITSMSAPVQASAPALTKSQTDRLEVLLNPKDEISLNSGKPFRELESELLSRRKKDLQQIYAEERENYLGKLEREITRFFVDRGFLEIKSPILIPLEYIERMGIDNDTELSKQIFRVDKNFCLRPMLAPNLANYLRKLDRALPDPIKIFEIGPCYRKESDGKEHLEEFTMLNFCQMGSGCTRENLESIITDFLNHLGIDFKIVGDSCMVFGDTLDVMHGDLELSSAVVGPIPLDREWGIDKPWIGAGFGLERLLKVKHDFKNIKRAARSESYYNGISTNL

SEQ ID NO: 331 - DNA, 3051 bp, Artificial Sequence; identical to SEQ ID NO: 319
  Description of Artificial Sequence: Synthetic polynucleotide
  EBAG91-29::FUS::PylRS(AF)

SEQ ID NO: 332 - protein, 1016 aa, Artificial Sequence; identical to SEQ ID NO: 320
  Description of Artificial Sequence: Synthetic polypeptide
  EBAG91-29::FUS::PylRS(AF)

SEQ ID NO: 333 - DNA, 513 bp, Artificial Sequence
  Description of Artificial Sequence: Synthetic polynucleotide
  EBAG91-29::MCP
atggccatcacccagtttcggttatttaaattttgtacctgcctagcaacagtattctcattcctaaagagattaatatgcagatctgcgatcgcatatccctatgatgtgccggattatgctggagcaccaggaagtgctggttctgctgctggtagtggagcttctaactttactcagttcgttctcgtcgacaatggcggaactggcgacgtgactgtcgccccaagcaacttcgctaacgggatcgctgaatggatcagctctaactcgcgttcacaggcttacaaagtaacctgtagcgttcgtcagagctctgcgcagaatcgcaaatacaccatcaaagtcgaggtgcctaaaggcgcctggcgttcgtacttaaatatggaactaaccattccaattttcgccacgaattccgactgcgagcttattgttaaggcaatgcaaggtctcctaaaagatggaaacccgattccctcagcaatcgcagcaaactccggcatctactaa

SEQ ID NO: 334 - protein, 170 aa, Artificial Sequence
  Description of Artificial Sequence: Synthetic polypeptide
  EBAG91-29::MCP
MAITQFRLFKFCTCLATVFSFLKRLICRSAIAYPYDVPDYAGAPGSAGSAAGSGASNFTQFVLVDNGGTGDVTVAPSNFANGIAEWISSNSRSQAYKVTCSVRQSSAQNRKYTIKVEVPKGAWRSYLNMELTIPIFATNSDCELIVKAMQGLLKDGNPIPSAIAANSGIY

SEQ ID NO: 335 - DNA, 2397 bp, Artificial Sequence
  Description of Artificial Sequence: Synthetic polynucleotide
  EBAG91-29::EWSR1::MCP
atggccatcacccagtttcggttatttaaattttgtacctgcctagcaacagtattctcattcctaaagagattaatatgcagatctatggcgtccacggattacagtacctatagccaagctgcagcgcagcagggctacagtgcttacaccgcccagcccactcaaggatatgcacagaccacccaggcatatgggcaacaaagctatggaacctatggacagcccactgatgtcagctatacccaggctcagaccactgcaacctatgggcagaccgcctatgcaacttcttatggacagcctcccactggttatactactccaactgccccccaggcatacagccagcctgtccaggggtatggcactggtgcttatgataccaccactgctacagtcaccaccacccaggcctcctatgcagctcagtctgcatatggcactcagcctgcttatccagcctatgggcagcagccagcagccactgcacctacaagaccgcaggatggaaacaagcccactgagactagtcaacctcaatctagcacagggggttacaaccagcccagcctaggatatggacagagtaactacagttatccccaggtacctgggagctaccccatgcagccagtcactgcacctccatcctaccctcctaccagctattcctctacacagccgactagttatgatcagagcagttactctcagcagaacacctatgggcaaccgagcagctatggacagcagagtagctatggtcaacaaagcagctatgggcagcagcctcccactagttacccaccccaaactggatcctacagccaagctccaagtcaatatagccaacagagcagcagctacgggcagcagagttcattccgacaggaccaccccagtagcatgggtgtttatgggcaggagtctggaggattttccggaccaggagagaaccggagcatgagtggccctgataaccggggcaggggaagagggggatttgatcgtggaggcatgagcagaggtgggcggggaggaggacgcggtggaatgggcagcgctggagagcgaggtggcttcaataagcctggtggacccatggatgaaggaccagatcttgatctaggcccacctgtagatccagatgaagactctgacaacagtgcaatttatgtacaaggattaaatgacagtgtgactctagatgatctggcagacttctttaagcagtgtggggttgttaagatgaacaagagaactgggcaacccatgatccacatctacctggacaaggaaacaggaaagcccaaaggcgatgccacagtgtcctatgaagacccacctactgccaaggctgccgtggaatggtttgatgggaaagattttcaagggagcaaacttaaagtctcccttgctcggaagaagcctccaatgaacagtatgcggggtggtctgccaccccgtgagggcagaggcatgccaccaccactccgtggaggtccaggaggcccaggaggtcctgggggacccatgggtcgcatgggaggccgtggaggagatagaggaggcttccctccaagaggaccccggggttcccgagggaacccctctggaggaggaaacgtccagcaccgagctggagactggcagtgtcccaatccgggttgtggaaaccagaacttcgcctggagaacagagtgcaaccagtgtaaggccccaaagcctgaaggcttcctcccgccaccctttccgcccccgggtggtgatcgtggcagaggtggccctggtggcatgcggggaggaagaggtggcctcatggatcgtggtggtcccggtggaatgttcagaggtggccgtggtggagacagaggtggcttccgtggtggccggggcatggaccgaggtggctttggtggaggaagacgaggtggccctggggggccccctggacctttgatggaacaggcgatcgcatatccctatgatgtgccggattatgctggagcaccaggaagtgctggttctgctgctggtagtggagcttctaactttactcagttcgttctcgtcgacaatggcggaactggcgacgtgactgtcgccccaagcaacttcgctaacgggatcgctgaatggatcagctctaactcgcgttcacaggcttacaaagtaacctgtagcgttcgtcagagctctgcgcagaatcgcaaatacaccatcaaagtcgaggtgcctaaaggcgcctggcgttcgtacttaaatatggaactaaccattccaattttcgccacgaattccgactgcgagcttattgttaaggcaatgcaaggtctcctaaaagatggaaacccgattccctcagcaatcgcagcaaactccggcatctactaa

SEQ ID NO: 336 - protein, 798 aa, Artificial Sequence
  Description of Artificial Sequence: Synthetic polypeptide
  EBAG91-29::EWSR1::MCP
MAITQFRLFKFCTCLATVFSFLKRLICRSMASTDYSTYSQAAAQQGYSAYTAQPTQGYAQTTQAYGQQSYGTYGQPTDVSYTQAQTTATYGQTAYATSYGQPPTGYTTPTAPQAYSQPVQGYGTGAYDTTTATVTTTQASYAAQSAYGTQPAYPAYGQQPAATAPTRPQDGNKPTETSQPQSSTGGYNQPSLGYGQSNYSYPQVPGSYPMQPVTAPPSYPPTSYSSTQPTSYDQSSYSQQNTYGQPSSYGQQSSYGQQSSYGQQPPTSYPPQTGSYSQAPSQYSQQSSSYGQQSSFRQDHPSSMGVYGQESGGFSGPGENRSMSGPDNRGRGRGGFDRGGMSRGGRGGGRGGMGSAGERGGFNKPGGPMDEGPDLDLGPPVDPDEDSDNSAIYVQGLNDSVTLDDLADFFKQCGVVKMNKRTGQPMIHIYLDKETGKPKGDATVSYEDPPTAKAAVEWFDGKDFQGSKLKVSLARKKPPMNSMRGGLPPREGRGMPPPLRGGPGGPGGPGGPMGRMGGRGGDRGGFPPRGPRGSRGNPSGGGNVQHRAGDWQCPNPGCGNQNFAWRTECNQCKAPKPEGFLPPPFPPPGGDRGRGGPGGMRGGRGGLMDRGGPGGMFRGGRGGDRGGFRGGRGMDRGGFGGGRRGGPGGPPGPLMEQAIAYPYDVPDYAGAPGSAGSAAGSGASNFTQFVLVDNGGTGDVTVAPSNFANGIAEWISSNSRSQAYKVTCSVRQSSAQNRKYTIKVEVPKGAWRSYLNMELTIPIFATNSDCELIVKAMQGLLKDGNPIPSAIAANSGIY

SEQ ID NO: 337 - DNA, 3093 bp, Artificial Sequence
  Description of Artificial Sequence: Synthetic polynucleotide
  EBAG9::EWSR1::4xlambdaN22
atggccatcacccagtttcggttatttaaattttgtacctgcctagcaacagtattctcattcctaaagagattaatatgcagatctggcagaggacggaaattaagtggagaccaaataactttgccaactacagttgattattcatcagttcctaagcagacagatgttgaagagtggacttcctgggatgaagatgcacccaccagtgtaaagatcgaaggagggaatgggaatgtggcaacacaacaaaattctttggaacaactggaacctgactattttaaggacatgacaccaactattaggaaaactcagaaaattgttattaagaagagagaaccattgaattttggcatcccagatgggagcacaggtttctctagtagattagcagctacacaagatctgccttttattcatcagtcttctgaattaggtgacttagatacctggcaggaaaataccaatgcatgggaagaagaagaagatgcagcctggcaagcagaagaagttctgagacagcagaaactagcagacagagaaaagagagcagccgaacaacaaaggaagaaaatggaaaaggaagcacaacggctaatgaagaaggaacaaaacaaaattggtgtgaaactttcaatggcgtccacggattacagtacctatagccaagctgcagcgcagcagggctacagtgcttacaccgcccagcccactcaaggatatgcacagaccacccaggcatatgggcaacaaagctatggaacctatggacagcccactgatgtcagctatacccaggctcagaccactgcaacctatgggcagaccgcctatgcaacttcttatggacagcctcccactggttatactactccaactgccccccaggcatacagccagcctgtccaggggtatggcactggtgcttatgataccaccactgctacagtcaccaccacccaggcctcctatgcagctcagtctgcatatggcactcagcctgcttatccagcctatgggcagcagccagcagccactgcacctacaagaccgcaggatggaaacaagcccactgagactagtcaacctcaatctagcacagggggttacaaccagcccagcctaggatatggacagagtaactacagttatccccaggtacctgggagctaccccatgcagccagtcactgcacctccatcctaccctcctaccagctattcctctacacagccgactagttatgatcagagcagttactctcagcagaacacctatgggcaaccgagcagctatggacagcagagtagctatggtcaacaaagcagctatgggcagcagcctcccactagttacccaccccaaactggatcctacagccaagctccaagtcaatatagccaacagagcagcagctacgggcagcagagttcattccgacaggaccaccccagtagcatgggtgtttatgggcaggagtctggaggattttccggaccaggagagaaccggagcatgagtggccctgataaccggggcaggggaagagggggatttgatcgtggaggcatgagcagaggtgggcggggaggaggacgcggtggaatgggcagcgctggagagcgaggtggcttcaataagcctggtggacccatggatgaaggaccagatcttgatctaggcccacctgtagatccagatgaagactctgacaacagtgcaatttatgtacaaggattaaatgacagtgtgactctagatgatctggcagacttctttaagcagtgtggggttgttaagatgaacaagagaactgggcaacccatgatccacatctacctggacaaggaaacaggaaagcccaaaggcgatgccacagtgtcctatgaagacccacctactgccaaggctgccgtggaatggtttgatgggaaagattttcaagggagcaaacttaaagtctcccttgctcggaagaagcctccaatgaacagtatgcggggtggtctgccaccccgtgagggcagaggcatgccaccaccactccgtggaggtccaggaggcccaggaggtcctgggggacccatgggtcgcatgggaggccgtggaggagatagaggaggcttccctccaagaggaccccggggttcccgagggaacccctctggaggaggaaacgtccagcaccgagctggagactggcagtgtcccaatccgggttgtggaaaccagaacttcgcctggagaacagagtgcaaccagtgtaaggccccaaagcctgaaggcttcctcccgccaccctttccgcccccgggtggtgatcgtggcagaggtggccctggtggcatgcggggaggaagaggtggcctcatggatcgtggtggtcccggtggaatgttcagaggtggccgtggtggagacagaggtggcttccgtggtggccggggcatggaccgaggtggctttggtggaggaagacgaggtggccctggggggccccctggacctttgatggaacaggcgatcgcaggagcaccaggaagtgctggttctgctgctggtagtggagagcagaagctgatctcagaggaggacctgctagccaccatggacgcacaaacacgacgacgtgagcgtcgcgctgagaaacaagctcaatggaaagctgcaaacccaccgctcgacggagccggagctggcgctggagctggagccggagctggcggtctagccaccatggacgcacaaacacgacgacgtgagcgtcgcgctgagaaacaagctcaatggaaagctgcaaacccaccgctcgacggagccggagctggcgctggagctggagccggagctggcggtctagccaccatggacgcacaaacacgacgacgtgagcgtcgcgctgagaaacaagctcaatggaaagctgcaaacccaccgctcgacggagccggagctggcgctggagctggagccggagctggcggtctagccaccatggacgcacaaacacgacgacgtgagcgtcgcgctgagaaacaagctcaatggaaagctgcaaacccaccgctcgagtctagagggcccgtttaa

SEQ ID NO: 338 - protein, 1030 aa, Artificial Sequence
  Description of Artificial Sequence: Synthetic polypeptide
  EBAG9::EWSR1::4xlambdaN22
MAITQFRLFKFCTCLATVFSFLKRLICRSGRGRKLSGDQITLPTTVDYSSVPKQTDVEEWTSWDEDAPTSVKIEGGNGNVATQQNSLEQLEPDYFKDMTPTIRKTQKIVIKKREPLNFGIPDGSTGFSSRLAATQDLPFIHQSSELGDLDTWQENTNAWEEEEDAAWQAEEVLRQQKLADREKRAAEQQRKKMEKEAQRLMKKEQNKIGVKLSMASTDYSTYSQAAAQQGYSAYTAQPTQGYAQTTQAYGQQSYGTYGQPTDVSYTQAQTTATYGQTAYATSYGQPPTGYTTPTAPQAYSQPVQGYGTGAYDTTTATVTTTQASYAAQSAYGTQPAYPAYGQQPAATAPTRPQDGNKPTETSQPQSSTGGYNQPSLGYGQSNYSYPQVPGSYPMQPVTAPPSYPPTSYSSTQPTSYDQSSYSQQNTYGQPSSYGQQSSYGQQSSYGQQPPTSYPPQTGSYSQAPSQYSQQSSSYGQQSSFRQDHPSSMGVYGQESGGFSGPGENRSMSGPDNRGRGRGGFDRGGMSRGGRGGGRGGMGSAGERGGFNKPGGPMDEGPDLDLGPPVDPDEDSDNSAIYVQGLNDSVTLDDLADFFKQCGVVKMNKRTGQPMIHIYLDKETGKPKGDATVSYEDPPTAKAAVEWFDGKDFQGSKLKVSLARKKPPMNSMRGGLPPREGRGMPPPLRGGPGGPGGPGGPMGRMGGRGGDRGGFPPRGPRGSRGNPSGGGNVQHRAGDWQCPNPGCGNQNFAWRTECNQCKAPKPEGFLPPPFPPPGGDRGRGGPGGMRGGRGGLMDRGGPGGMFRGGRGGDRGGFRGGRGMDRGGFGGGRRGGPGGPPGPLMEQAIAGAPGSAGSAAGSGEQKLISEEDLLATMDAQTRRRERRAEKQAQWKAANPPLDGAGAGAGAGAGAGGLATMDAQTRRRERRAEKQAQWKAANPPLDGAGAGAGAGAGAGGLATMDAQTRRRERRAEKQAQWKAANPPLDGAGAGAGAGAGAGGLATMDAQTRRRERRAEKQAQWKAANPPLESRGPV

SEQ ID NO: 339 - DNA, 2541 bp, Artificial Sequence
  Description of Artificial Sequence: Synthetic polynucleotide
  EBAG91-29::EWSR1::4xlambdaN22
atggccatcacccagtttcggttatttaaattttgtacctgcctagcaacagtattctcattcctaaagagattaatatgcagatctatggcgtccacggattacagtacctatagccaagctgcagcgcagcagggctacagtgcttacaccgcccagcccactcaaggatatgcacagaccacccaggcatatgggcaacaaagctatggaacctatggacagcccactgatgtcagctatacccaggctcagaccactgcaacctatgggcagaccgcctatgcaacttcttatggacagcctcccactggttatactactccaactgccccccaggcatacagccagcctgtccaggggtatggcactggtgcttatgataccaccactgctacagtcaccaccacccaggcctcctatgcagctcagtctgcatatggcactcagcctgcttatccagcctatgggcagcagccagcagccactgcacctacaagaccgcaggatggaaacaagcccactgagactagtcaacctcaatctagcacagggggttacaaccagcccagcctaggatatggacagagtaactacagttatccccaggtacctgggagctaccccatgcagccagtcactgcacctccatcctaccctcctaccagctattcctctacacagccgactagttatgatcagagcagttactctcagcagaacacctatgggcaaccgagcagctatggacagcagagtagctatggtcaacaaagcagctatgggcagcagcctcccactagttacccaccccaaactggatcctacagccaagctccaagtcaatatagccaacagagcagcagctacgggcagcagagttcattccgacaggaccaccccagtagcatgggtgtttatgggcaggagtctggaggattttccggaccaggagagaaccggagcatgagtggccctgataaccggggcaggggaagagggggatttgatcgtggaggcatgagcagaggtgggcggggaggaggacgcggtggaatgggcagcgctggagagcgaggtggcttcaataagcctggtggacccatggatgaaggaccagatcttgatctaggcccacctgtagatccagatgaagactctgacaacagtgcaatttatgtacaaggattaaatgacagtgtgactctagatgatctggcagacttctttaagcagtgtggggttgttaagatgaacaagagaactgggcaacccatgatccacatctacctggacaaggaaacaggaaagcccaaaggcgatgccacagtgtcctatgaagacccacctactgccaaggctgccgtggaatggtttgatgggaaagattttcaagggagcaaacttaaagtctcccttgctcggaagaagcctccaatgaacagtatgcggggtggtctgccaccccgtgagggcagaggcatgccaccaccactccgtggaggtccaggaggcccaggaggtcctgggggacccatgggtcgcatgggaggccgtggaggagatagaggaggcttccctccaagaggaccccggggttcccgagggaacccctctggaggaggaaacgtccagcaccgagctggagactggcagtgtcccaatccgggttgtggaaaccagaacttcgcctggagaacagagtgcaaccagtgtaaggccccaaagcctgaaggcttcctcccgccaccctttccgcccccgggtggtgatcgtggcagaggtggccctggtggcatgcggggaggaagaggtggcctcatggatcgtggtggtcccggtggaatgttcagaggtggccgtggtggagacagaggtggcttccgtggtggccggggcatggaccgaggtggctttggtggaggaagacgaggtggccctggggggccccctggacctttgatggaacaggcgatcgcaggagcaccaggaagtgctggttctgctgctggtagtggagagcagaagctgatctcagaggaggacctgctagccaccatggacgcacaaacacgacgacgtgagcgtcgcgctgagaaacaagctcaatggaaagctgcaaacccaccgctcgacggagccggagctggcgctggagctggagccggagctggcggtctagccaccatggacgcacaaacacgacgacgtgagcgtcgcgctgagaaacaagctcaatggaaagctgcaaacccaccgctcgacggagccggagctggcgctggagctggagccggagctggcggtctagccaccatggacgcacaaacacgacgacgtgagcgtcgcgctgagaaacaagctcaatggaaagctgcaaacccaccgctcgacggagccggagctggcgctggagctggagccggagctggcggtctagccaccatggacgcacaaacacgacgacgtgagcgtcgcgctgagaaacaagctcaatggaaagctgcaaacccaccgctcgagtctagagggcccgtttaa

SEQ ID NO: 340 - protein, 846 aa, Artificial Sequence
  Description of Artificial Sequence: Synthetic polypeptide
  EBAG91-29::EWSR1::4xlambdaN22
MAITQFRLFKFCTCLATVFSFLKRLICRSMASTDYSTYSQAAAQQGYSAYTAQPTQGYAQTTQAYGQQSYGTYGQPTDVSYTQAQTTATYGQTAYATSYGQPPTGYTTPTAPQAYSQPVQGYGTGAYDTTTATVTTTQASYAAQSAYGTQPAYPAYGQQPAATAPTRPQDGNKPTETSQPQSSTGGYNQPSLGYGQSNYSYPQVPGSYPMQPVTAPPSYPPTSYSSTQPTSYDQSSYSQQNTYGQPSSYGQQSSYGQQSSYGQQPPTSYPPQTGSYSQAPSQYSQQSSSYGQQSSFRQDHPSSMGVYGQESGGFSGPGENRSMSGPDNRGRGRGGFDRGGMSRGGRGGGRGGMGSAGERGGFNKPGGPMDEGPDLDLGPPVDPDEDSDNSAIYVQGLNDSVTLDDLADFFKQCGVVKMNKRTGQPMIHIYLDKETGKPKGDATVSYEDPPTAKAAVEWFDGKDFQGSKLKVSLARKKPPMNSMRGGLPPREGRGMPPPLRGGPGGPGGPGGPMGRMGGRGGDRGGFPPRGPRGSRGNPSGGGNVQHRAGDWQCPNPGCGNQNFAWRTECNQCKAPKPEGFLPPPFPPPGGDRGRGGPGGMRGGRGGLMDRGGPGGMFRGGRGGDRGGFRGGRGMDRGGFGGGRRGGPGGPPGPLMEQAIAGAPGSAGSAAGSGEQKLISEEDLLATMDAQTRRRERRAEKQAQWKAANPPLDGAGAGAGAGAGAGGLATMDAQTRRRERRAEKQAQWKAANPPLDGAGAGAGAGAGAGGLATMDAQTRRRERRAEKQAQWKAANPPLDGAGAGAGAGAGAGGLATMDAQTRRRERRAEKQAQWKAANPPLESRGPV

SEQ ID NO: 341 - DNA, 2121 bp, Artificial Sequence
  Description of Artificial Sequence: Synthetic polynucleotide
  EBAG9::PylRS(AA)
atggccatcacccagtttcggttatttaaattttgtacctgcctagcaacagtattctcattcctaaagagattaatatgcagatctggcagaggacggaaattaagtggagaccaaataactttgccaactacagttgattattcatcagttcctaagcagacagatgttgaagagtggacttcctgggatgaagatgcacccaccagtgtaaagatcgaaggagggaatgggaatgtggcaacacaacaaaattctttggaacaactggaacctgactattttaaggacatgacaccaactattaggaaaactcagaaaattgttattaagaagagagaaccattgaattttggcatcccagatgggagcacaggtttctctagtagattagcagctacacaagatctgccttttattcatcagtcttctgaattaggtgacttagatacctggcaggaaaataccaatgcatgggaagaagaagaagatgcagcctggcaagcagaagaagttctgagacagcagaaactagcagacagagaaaagagagcagccgaacaacaaaggaagaaaatggaaaaggaagcacaacggctaatgaagaaggaacaaaacaaaattggtgtgaaactttcaggcgccgattacaaggacgatgatgacaagggagcaccaggaagtgctggttctgctgctggtagtggagcgtgcccggtgccgctgcagctgccgccgctggaacgcctgaccctggatgacaaaaaaccgctgaataccctgatctctgctactggtctgtggatgagtcgtaccggaaccattcataaaatcaaacaccacgaggttagccgttcgaaaatctatattgagatggcgtgtggcgatcatctggttgtgaacaatagccgctcttctcgtacagcacgtgcactgcgtcaccacaaatatcgtaaaacctgtaaacgttgccgtgtgtccgatgaggatctgaacaaattcctgacaaaagccaatgaggaccaaacaagcgtgaaagtgaaagtcgttagcgctcctacccgtactaaaaaagcaatgccgaaatccgttgctcgtgcccctaaaccactggaaaacactgaagcagcacaggcacagccgtctggaagcaaattctctccggccattcctgtttctacccaggagtccgtttctgttccagcaagtgtgagcaccagcattagcagtattagcaccggtgccaccgctagcgccctggttaaaggcaataccaatccgattacaagcatgtctgccccggttcaagcatcagctccagcactgacaaaatcccaaaccgatcgtctggaggttctgctgaatccgaaagacgaaatcagcctgaattccggcaaaccgtttcgtgaactggagagcgaactgctgtcacgtcgtaaaaaagacctgcaacaaatctatgccgaagaacgtgagaactatctggggaaactggaacgtgaaatcacccgctttttcgtggatcgtggctttctggagatcaaatccccgattctgattcctctggagtatatcgagcgtatgggcatcgacaatgataccgaactgagcaaacaaattttccgtgtggataaaaacttctgtctgcgccctatgctggcaccaaatctgtataactatctgcgcaaactggaccgtgccctgcctgatcctatcaaaatcttcgagatcggcccgtgttatcgtaaagagtccgacggtaaagaacatctggaggagtttaccatgctggcctttgcccaaatgggttcaggttgtactcgtgagaacctggaaagcatcatcaccgattttctgaaccacctgggcattgacttcaaaattgtgggcgacagctgtatggtgtatggcgacaccctggatgtcatgcacggcgacctggaactgtctagtgccgttgttggaccaattccgctggaccgtgagtggggtatcgacaaaccgtggatcggagcaggattcggtctggaacgcctgctgaaagtgaaacacgacttcaaaaacatcaaacgtgccgcccgttctgaatcgtattataacgggatctctacgaacctgtaa

SEQ ID NO: 342 - protein, 706 aa, Artificial Sequence
  Description of Artificial Sequence: Synthetic polypeptide
  EBAG9::PylRS(AA)
MAITQFRLFKFCTCLATVFSFLKRLICRSGRGRKLSGDQITLPTTVDYSSVPKQTDVEEWTSWDEDAPTSVKIEGGNGNVATQQNSLEQLEPDYFKDMTPTIRKTQKIVIKKREPLNFGIPDGSTGFSSRLAATQDLPFIHQSSELGDLDTWQENTNAWEEEEDAAWQAEEVLRQQKLADREKRAAEQQRKKMEKEAQRLMKKEQNKIGVKLSGADYKDDDDKGAPGSAGSAAGSGACPVPLQLPPLERLTLDDKKPLNTLISATGLWMSRTGTIHKIKHHEVSRSKIYIEMACGDHLVVNNSRSSRTARALRHHKYRKTCKRCRVSDEDLNKFLTKANEDQTSVKVKVVSAPTRTKKAMPKSVARAPKPLENTEAAQAQPSGSKFSPAIPVSTQESVSVPASVSTSISSISTGATASALVKGNTNPITSMSAPVQASAPALTKSQTDRLEVLLNPKDEISLNSGKPFRELESELLSRRKKDLQQIYAEERENYLGKLEREITRFFVDRGFLEIKSPILIPLEYIERMGIDNDTELSKQIFRVDKNFCLRPMLAPNLYNYLRKLDRALPDPIKIFEIGPCYRKESDGKEHLEEFTMLAFAQMGSGCTRENLESIITDFLNHLGIDFKIVGDSCMVYGDTLDVMHGDLELSSAVVGPIPLDREWGIDKPWIGAGFGLERLLKVKHDFKNIKRAARSESYYNGISTNL

SEQ ID NO: 343 - DNA, 2121 bp, Artificial Sequence
  Description of Artificial Sequence: Synthetic polynucleotide
  EBAG9::PylRS(AAAF
atggccatcacccagtttcggttatttaaattttgtacctgcctagcaacagtattctcattcctaaagagattaatatgcagatctggcagaggacggaaattaagtggagaccaaataactttgccaactacagttgattattcatcagttcctaagcagacagatgttgaagagtggacttcctgggatgaagatgcacccaccagtgtaaagatcgaaggagggaatgggaatgtggcaacacaacaaaattctttggaacaactggaacctgactattttaaggacatgacaccaactattaggaaaactcagaaaattgttattaagaagagagaaccattgaattttggcatcccagatgggagcacaggtttctctagtagattagcagctacacaagatctgccttttattcatcagtcttctgaattaggtgacttagatacctggcaggaaaataccaatgcatgggaagaagaagaagatgcagcctggcaagcagaagaagttctgagacagcagaaactagcagacagagaaaagagagcagccgaacaacaaaggaagaaaatggaaaaggaagcacaacggctaatgaagaaggaacaaaacaaaattggtgtgaaactttcaggcgccgattacaaggacgatgatgacaagggagcaccaggaagtgctggttctgctgctggtagtggagcgtgcccggtgccgctgcagctgccgccgctggaacgcctgaccctggatgataaaaaaccgctgaataccctgatctctgctactggtctgtggatgagtcgtaccggaaccattcataaaatcaaacaccacgaggttagccgttcgaaaatctatattgagatggcgtgtggcgatcatctggttgtgaacaatagccgctcttctcgtacagcacgtgcactgcgtcaccacaaatatcgtaaaacctgtaaacgttgccgtgtgtccgatgaggatctgaacaaattcctgacaaaagccaatgaggaccaaacaagcgtgaaagtgaaagtcgttagcgctcctacccgtactaaaaaagcaatgccgaaatccgttgctcgtgcccctaaaccactggaaaacactgaagcagcacaggcacagccgtctggaagcaaattctctccggccattcctgtttctacccaggagtccgtttctgttccagcaagtgtgagcaccagcattagcagtattagcaccggtgccaccgctagcgccctggttaaaggcaataccaatccgattacaagcatgtctgccccggttcaagcatcagctccagcactgacaaaatcccaaaccgatcgtctggaggttctgctgaatccgaaagacgaaatcagcctgaattccggcaaaccgtttcgtgaactggagagcgaactgctgtcacgtcgtaaaaaagacctgcaacaaatctatgccgaagaacgtgagaactatctggggaaactggaacgtgaaatcacccgctttttcgtggatcgtggctttctggagatcaaatccccgattctgattcctctggagtatatcgagcgtatgggcatcgacaatgataccgaactgagcaaacaaattttccgtgtggataaaaacttctgtctgcgccctatgctagcaccaaatctggctaactatctgcgcaaactggaccgtgccctgcctgatcctatcaaaatcttcgagatcggcccgtgttatcgtaaagagtccgacggtaaagaacatctggaggagtttaccatgctggcctttgcccaaatgggttcaggttgtactcgtgagaacctggaaagcatcatcaccgattttctgaaccacctgggcattgacttcaaaattgtgggcgacagctgtatggtgtttggcgacaccctggatgtcatgcacggcgacctggaactgtctagtgccgttgtgggcccaatcccgctggatcgtgagtggggtatcgacaaaccttggatcggtgcgggttttggtctggagcgtctgctgaaagtaaaacacgacttcaagaacatcaaacgtgctgcacgttccgagtcctattacaatggtatttctactaacctgtaa

SEQ ID NO: 344 - protein, 706 aa, Artificial Sequence
  Description of Artificial Sequence: Synthetic polypeptide
  EBAG9::PylRS(AAAF
MAITQFRLFKFCTCLATVFSFLKRLICRSGRGRKLSGDQITLPTTVDYSSVPKQTDVEEWTSWDEDAPTSVKIEGGNGNVATQQNSLEQLEPDYFKDMTPTIRKTQKIVIKKREPLNFGIPDGSTGFSSRLAATQDLPFIHQSSELGDLDTWQENTNAWEEEEDAAWQAEEVLRQQKLADREKRAAEQQRKKMEKEAQRLMKKEQNKIGVKLSGADYKDDDDKGAPGSAGSAAGSGACPVPLQLPPLERLTLDDKKPLNTLISATGLWMSRTGTIHKIKHHEVSRSKIYIEMACGDHLVVNNSRSSRTARALRHHKYRKTCKRCRVSDEDLNKFLTKANEDQTSVKVKVVSAPTRTKKAMPKSVARAPKPLENTEAAQAQPSGSKFSPAIPVSTQESVSVPASVSTSISSISTGATASALVKGNTNPITSMSAPVQASAPALTKSQTDRLEVLLNPKDEISLNSGKPFRELESELLSRRKKDLQQIYAEERENYLGKLEREITRFFVDRGFLEIKSPILIPLEYIERMGIDNDTELSKQIFRVDKNFCLRPMLAPNLANYLRKLDRALPDPIKIFEIGPCYRKESDGKEHLEEFTMLAFAQMGSGCTRENLESIITDFLNHLGIDFKIVGDSCMVFGDTLDVMHGDLELSSAVVGPIPLDREWGIDKPWIGAGFGLERLLKVKHDFKNIKRAARSESYYNGISTNL

SEQ ID NO: 345 - DNA, 3603 bp, Artificial Sequence
  Description of Artificial Sequence: Synthetic polynucleotide
  EBAG9::FUS::PylRS(AA)
atggccatcacccagtttcggttatttaaattttgtacctgcctagcaacagtattctcattcctaaagagattaatatgcagatctggcagaggacggaaattaagtggagaccaaataactttgccaactacagttgattattcatcagttcctaagcagacagatgttgaagagtggacttcctgggatgaagatgcacccaccagtgtaaagatcgaaggagggaatgggaatgtggcaacacaacaaaattctttggaacaactggaacctgactattttaaggacatgacaccaactattaggaaaactcagaaaattgttattaagaagagagaaccattgaattttggcatcccagatgggagcacaggtttctctagtagattagcagctacacaagatctgccttttattcatcagtcttctgaattaggtgacttagatacctggcaggaaaataccaatgcatgggaagaagaagaagatgcagcctggcaagcagaagaagttctgagacagcagaaactagcagacagagaaaagagagcagccgaacaacaaaggaagaaaatggaaaaggaagcacaacggctaatgaagaaggaacaaaacaaaattggtgtgaaactttcaggagcacccggctccgccggctccgccgccggctccggcatggcctcaaacgattatacccaacaagcaacccaaagctatggggcctaccccacccagcccgggcagggctattcccagcagagcagtcagccctacggacagcagagttacagtggttatagccagtccacggacacttcaggatatggccagagcagctattcttcttatggccagagccagaacacaggctatggaactcagtcaactccccagggatatggctcgactggcggctatggcagtagccagagctcccaatcgtcttacgggcagcagtcctcctaccctggctatggccagcagccagctcccagcagcacctcgggaagttacggtagcagttctcagagcagcagctatgggcagccccagagtgggagctacagccagcagcctagctatggtggacagcagcaaagctatggacagcagcaaagctataatccccctcagggctatggacagcagaaccagtacaacagcagcagtggtggtggaggtggaggtggaggtggaggtaactatggccaagatcaatcctccatgagtagtggtggtggcagtggtggcggttatggcaatcaagaccagagtggtggaggtggcagcggtggctatggacagcaggaccgtggaggccgcggcaggggtggcagtggtggcggcggcggcggcggcggtggtggttacaaccgcagcagtggtggctatgaacccagaggtcgtggaggtggccgtggaggcagaggtggcatgggcggaagtgaccgtggtggcttcaataaatttggtggccctcgggaccaaggatcacgtcatgactccgaacaggataattcagacaacaacaccatctttgtgcaaggcctgggtgagaatgttacaattgagtctgtggctgattacttcaagcagattggtattattaagacaaacaagaaaacgggacagcccatgattaatttgtacacagacagggaaactggcaagctgaagggagaggcaacggtctcttttgatgacccaccttcagctaaagcagctattgactggtttgatggtaaagaattctccggaaatcctatcaaggtctcatttgctactcgccgggcagactttaatcggggtggtggcaatggtcgtggaggccgagggcgaggaggacccatgggccgtggaggctatggaggtggtggcagtggtggtggtggccgaggaggatttcccagtggaggtggtggcggtggaggacagcagcgagctggtgactggaagtgtcctaatcccacctgtgagaatatgaacttctcttggaggaatgaatgcaaccagtgtaaggcccctaaaccagatggcccaggagggggaccaggtggctctcacatggggggtaactacggggatgatcgtcgtggtggcagaggtggtgcgatcgcaggcgccgattacaaggacgatgatgacaagggagcaccaggaagtgctggttctgctgctggtagtggagcgtgcccggtgccgctgcagctgccgccgctggaacgcctgaccctggatgacaaaaaaccgctgaataccctgatctctgctactggtctgtggatgagtcgtaccggaaccattcataaaatcaaacaccacgaggttagccgttcgaaaatctatattgagatggcgtgtggcgatcatctggttgtgaacaatagccgctcttctcgtacagcacgtgcactgcgtcaccacaaatatcgtaaaacctgtaaacgttgccgtgtgtccgatgaggatctgaacaaattcctgacaaaagccaatgaggaccaaacaagcgtgaaagtgaaagtcgttagcgctcctacccgtactaaaaaagcaatgccgaaatccgttgctcgtgcccctaaaccactggaaaacactgaagcagcacaggcacagccgtctggaagcaaattctctccggccattcctgtttctacccaggagtccgtttctgttccagcaagtgtgagcaccagcattagcagtattagcaccggtgccaccgctagcgccctggttaaaggcaataccaatccgattacaagcatgtctgccccggttcaagcatcagctccagcactgacaaaatcccaaaccgatcgtctggaggttctgctgaatccgaaagacgaaatcagcctgaattccggcaaaccgtttcgtgaactggagagcgaactgctgtcacgtcgtaaaaaagacctgcaacaaatctatgccgaagaacgtgagaactatctggggaaactggaacgtgaaatcacccgctttttcgtggatcgtggctttctggagatcaaatccccgattctgattcctctggagtatatcgagcgtatgggcatcgacaatgataccgaactgagcaaacaaattttccgtgtggataaaaacttctgtctgcgccctatgctggcaccaaatctgtataactatctgcgcaaactggaccgtgccctgcctgatcctatcaaaatcttcgagatcggcccgtgttatcgtaaagagtccgacggtaaagaacatctggaggagtttaccatgctggcctttgcccaaatgggttcaggttgtactcgtgagaacctggaaagcatcatcaccgattttctgaaccacctgggcattgacttcaaaattgtgggcgacagctgtatggtgtatggcgacaccctggatgtcatgcacggcgacctggaactgtctagtgccgttgttggaccaattccgctggaccgtgagtggggtatcgacaaaccgtggatcggagcaggattcggtctggaacgcctgctgaaagtgaaacacgacttcaaaaacatcaaacgtgccgcccgttctgaatcgtattataacgggatctctacgaacctgtaa

SEQ ID NO: 346 - protein, 1200 aa, Artificial Sequence
  Description of Artificial Sequence: Synthetic polypeptide
  EBAG9::FUS::PylRS(AA)
MAITQFRLFKFCTCLATVFSFLKRLICRSGRGRKLSGDQITLPTTVDYSSVPKQTDVEEWTSWDEDAPTSVKIEGGNGNVATQQNSLEQLEPDYFKDMTPTIRKTQKIVIKKREPLNFGIPDGSTGFSSRLAATQDLPFIHQSSELGDLDTWQENTNAWEEEEDAAWQAEEVLRQQKLADREKRAAEQQRKKMEKEAQRLMKKEQNKIGVKLSGAPGSAGSAAGSGMASNDYTQQATQSYGAYPTQPGQGYSQQSSQPYGQQSYSGYSQSTDTSGYGQSSYSSYGQSQNTGYGTQSTPQGYGSTGGYGSSQSSQSSYGQQSSYPGYGQQPAPSSTSGSYGSSSQSSSYGQPQSGSYSQQPSYGGQQQSYGQQQSYNPPQGYGQQNQYNSSSGGGGGGGGGGNYGQDQSSMSSGGGSGGGYGNQDQSGGGGSGGYGQQDRGGRGRGGSGGGGGGGGGGYNRSSGGYEPRGRGGGRGGRGGMGGSDRGGFNKFGGPRDQGSRHDSEQDNSDNNTIFVQGLGENVTIESVADYFKQIGIIKTNKKTGQPMINLYTDRETGKLKGEATVSFDDPPSAKAAIDWFDGKEFSGNPIKVSFATRRADFNRGGGNGRGGRGRGGPMGRGGYGGGGSGGGGRGGFPSGGGGGGGQQRAGDWKCPNPTCENMNFSWRNECNQCKAPKPDGPGGGPGGSHMGGNYGDDRRGGRGGAIAGADYKDDDDKGAPGSAGSAAGSGACPVPLQLPPLERLTLDDKKPLNTLISATGLWMSRTGTIHKIKHHEVSRSKIYIEMACGDHLVVNNSRSSRTARALRHHKYRKTCKRCRVSDEDLNKFLTKANEDQTSVKVKVVSAPTRTKKAMPKSVARAPKPLENTEAAQAQPSGSKFSPAIPVSTQESVSVPASVSTSISSISTGATASALVKGNTNPITSMSAPVQASAPALTKSQTDRLEVLLNPKDEISLNSGKPFRELESELLSRRKKDLQQIYAEERENYLGKLEREITRFFVDRGFLEIKSPILIPLEYIERMGIDNDTELSKQIFRVDKNFCLRPMLAPNLYNYLRKLDRALPDPIKIFEIGPCYRKESDGKEHLEEFTMLAFAQMGSGCTRENLESIITDFLNHLGIDFKIVGDSCMVYGDTLDVMHGDLELSSAVVGPIPLDREWGIDKPWIGAGFGLERLLKVKHDFKNIKRAARSESYYNGISTNL

SEQ ID NO: 347 - DNA, 3603 bp, Artificial Sequence
  Description of Artificial Sequence: Synthetic polynucleotide
  EBAG9::FUS::PylRS(AAAF
atggccatcacccagtttcggttatttaaattttgtacctgcctagcaacagtattctcattcctaaagagattaatatgcagatctggcagaggacggaaattaagtggagaccaaataactttgccaactacagttgattattcatcagttcctaagcagacagatgttgaagagtggacttcctgggatgaagatgcacccaccagtgtaaagatcgaaggagggaatgggaatgtggcaacacaacaaaattctttggaacaactggaacctgactattttaaggacatgacaccaactattaggaaaactcagaaaattgttattaagaagagagaaccattgaattttggcatcccagatgggagcacaggtttctctagtagattagcagctacacaagatctgccttttattcatcagtcttctgaattaggtgacttagatacctggcaggaaaataccaatgcatgggaagaagaagaagatgcagcctggcaagcagaagaagttctgagacagcagaaactagcagacagagaaaagagagcagccgaacaacaaaggaagaaaatggaaaaggaagcacaacggctaatgaagaaggaacaaaacaaaattggtgtgaaactttcaggagcacccggctccgccggctccgccgccggctccggcatggcctcaaacgattatacccaacaagcaacccaaagctatggggcctaccccacccagcccgggcagggctattcccagcagagcagtcagccctacggacagcagagttacagtggttatagccagtccacggacacttcaggatatggccagagcagctattcttcttatggccagagccagaacacaggctatggaactcagtcaactccccagggatatggctcgactggcggctatggcagtagccagagctcccaatcgtcttacgggcagcagtcctcctaccctggctatggccagcagccagctcccagcagcacctcgggaagttacggtagcagttctcagagcagcagctatgggcagccccagagtgggagctacagccagcagcctagctatggtggacagcagcaaagctatggacagcagcaaagctataatccccctcagggctatggacagcagaaccagtacaacagcagcagtggtggtggaggtggaggtggaggtggaggtaactatggccaagatcaatcctccatgagtagtggtggtggcagtggtggcggttatggcaatcaagaccagagtggtggaggtggcagcggtggctatggacagcaggaccgtggaggccgcggcaggggtggcagtggtggcggcggcggcggcggcggtggtggttacaaccgcagcagtggtggctatgaacccagaggtcgtggaggtggccgtggaggcagaggtggcatgggcggaagtgaccgtggtggcttcaataaatttggtggccctcgggaccaaggatcacgtcatgactccgaacaggataattcagacaacaacaccatctttgtgcaaggcctgggtgagaatgttacaattgagtctgtggctgattacttcaagcagattggtattattaagacaaacaagaaaacgggacagcccatgattaatttgtacacagacagggaaactggcaagctgaagggagaggcaacggtctcttttgatgacccaccttcagctaaagcagctattgactggtttgatggtaaagaattctccggaaatcctatcaaggtctcatttgctactcgccgggcagactttaatcggggtggtggcaatggtcgtggaggccgagggcgaggaggacccatgggccgtggaggctatggaggtggtggcagtggtggtggtggccgaggaggatttcccagtggaggtggtggcggtggaggacagcagcgagctggtgactggaagtgtcctaatcccacctgtgagaatatgaacttctcttggaggaatgaatgcaaccagtgtaaggcccctaaaccagatggcccaggagggggaccaggtggctctcacatggggggtaactacggggatgatcgtcgtggtggcagaggtggtgcgatcgcaggcgccgattacaaggacgatgatgacaagggagcaccaggaagtgctggttctgctgctggtagtggagcgtgcccggtgccgctgcagctgccgccgctggaacgcctgaccctggatgataaaaaaccgctgaataccctgatctctgctactggtctgtggatgagtcgtaccggaaccattcataaaatcaaacaccacgaggttagccgttcgaaaatctatattgagatggcgtgtggcgatcatctggttgtgaacaatagccgctcttctcgtacagcacgtgcactgcgtcaccacaaatatcgtaaaacctgtaaacgttgccgtgtgtccgatgaggatctgaacaaattcctgacaaaagccaatgaggaccaaacaagcgtgaaagtgaaagtcgttagcgctcctacccgtactaaaaaagcaatgccgaaatccgttgctcgtgcccctaaaccactggaaaacactgaagcagcacaggcacagccgtctggaagcaaattctctccggccattcctgtttctacccaggagtccgtttctgttccagcaagtgtgagcaccagcattagcagtattagcaccggtgccaccgctagcgccctggttaaaggcaataccaatccgattacaagcatgtctgccccggttcaagcatcagctccagcactgacaaaatcccaaaccgatcgtctggaggttctgctgaatccgaaagacgaaatcagcctgaattccggcaaaccgtttcgtgaactggagagcgaactgctgtcacgtcgtaaaaaagacctgcaacaaatctatgccgaagaacgtgagaactatctggggaaactggaacgtgaaatcacccgctttttcgtggatcgtggctttctggagatcaaatccccgattctgattcctctggagtatatcgagcgtatgggcatcgacaatgataccgaactgagcaaacaaattttccgtgtggataaaaacttctgtctgcgccctatgctagcaccaaatctggctaactatctgcgcaaactggaccgtgccctgcctgatcctatcaaaatcttcgagatcggcccgtgttatcgtaaagagtccgacggtaaagaacatctggaggagtttaccatgctggcctttgcccaaatgggttcaggttgtactcgtgagaacctggaaagcatcatcaccgattttctgaaccacctgggcattgacttcaaaattgtgggcgacagctgtatggtgtttggcgacaccctggatgtcatgcacggcgacctggaactgtctagtgccgttgtgggcccaatcccgctggatcgtgagtggggtatcgacaaaccttggatcggtgcgggttttggtctggagcgtctgctgaaagtaaaacacgacttcaagaacatcaaacgtgctgcacgttccgagtcctattacaatggtatttctactaacctgtaa

SEQ ID NO: 348 - protein, 1200 aa, Artificial Sequence
  Description of Artificial Sequence: Synthetic polypeptide
  EBAG9::FUS::PylRS(AAAF
MAITQFRLFKFCTCLATVFSFLKRLICRSGRGRKLSGDQITLPTTVDYSSVPKQTDVEEWTSWDEDAPTSVKIEGGNGNVATQQNSLEQLEPDYFKDMTPTIRKTQKIVIKKREPLNFGIPDGSTGFSSRLAATQDLPFIHQSSELGDLDTWQENTNAWEEEEDAAWQAEEVLRQQKLADREKRAAEQQRKKMEKEAQRLMKKEQNKIGVKLSGAPGSAGSAAGSGMASNDYTQQATQSYGAYPTQPGQGYSQQSSQPYGQQSYSGYSQSTDTSGYGQSSYSSYGQSQNTGYGTQSTPQGYGSTGGYGSSQSSQSSYGQQSSYPGYGQQPAPSSTSGSYGSSSQSSSYGQPQSGSYSQQPSYGGQQQSYGQQQSYNPPQGYGQQNQYNSSSGGGGGGGGGGNYGQDQSSMSSGGGSGGGYGNQDQSGGGGSGGYGQQDRGGRGRGGSGGGGGGGGGGYNRSSGGYEPRGRGGGRGGRGGMGGSDRGGFNKFGGPRDQGSRHDSEQDNSDNNTIFVQGLGENVTIESVADYFKQIGIIKTNKKTGQPMINLYTDRETGKLKGEATVSFDDPPSAKAAIDWFDGKEFSGNPIKVSFATRRADFNRGGGNGRGGRGRGGPMGRGGYGGGGSGGGGRGGFPSGGGGGGGQQRAGDWKCPNPTCENMNFSWRNECNQCKAPKPDGPGGGPGGSHMGGNYGDDRRGGRGGAIAGADYKDDDDKGAPGSAGSAAGSGACPVPLQLPPLERLTLDDKKPLNTLISATGLWMSRTGTIHKIKHHEVSRSKIYIEMACGDHLVVNNSRSSRTARALRHHKYRKTCKRCRVSDEDLNKFLTKANEDQTSVKVKVVSAPTRTKKAMPKSVARAPKPLENTEAAQAQPSGSKFSPAIPVSTQESVSVPASVSTSISSISTGATASALVKGNTNPITSMSAPVQASAPALTKSQTDRLEVLLNPKDEISLNSGKPFRELESELLSRRKKDLQQIYAEERENYLGKLEREITRFFVDRGFLEIKSPILIPLEYIERMGIDNDTELSKQIFRVDKNFCLRPMLAPNLANYLRKLDRALPDPIKIFEIGPCYRKESDGKEHLEEFTMLAFAQMGSGCTRENLESIITDFLNHLGIDFKIVGDSCMVFGDTLDVMHGDLELSSAVVGPIPLDREWGIDKPWIGAGFGLERLLKVKHDFKNIKRAARSESYYNGISTNL

SEQ ID NO: 349 - DNA, 3051 bp, Artificial Sequence
  Description of Artificial Sequence: Synthetic polynucleotide
  EBAG91-29::FUS::PylRS(AA)
atggccatcacccagtttcggttatttaaattttgtacctgcctagcaacagtattctcattcctaaagagattaatatgcagatctggagcacccggctccgccggctccgccgccggctccggcatggcctcaaacgattatacccaacaagcaacccaaagctatggggcctaccccacccagcccgggcagggctattcccagcagagcagtcagccctacggacagcagagttacagtggttatagccagtccacggacacttcaggatatggccagagcagctattcttcttatggccagagccagaacacaggctatggaactcagtcaactccccagggatatggctcgactggcggctatggcagtagccagagctcccaatcgtcttacgggcagcagtcctcctaccctggctatggccagcagccagctcccagcagcacctcgggaagttacggtagcagttctcagagcagcagctatgggcagccccagagtgggagctacagccagcagcctagctatggtggacagcagcaaagctatggacagcagcaaagctataatccccctcagggctatggacagcagaaccagtacaacagcagcagtggtggtggaggtggaggtggaggtggaggtaactatggccaagatcaatcctccatgagtagtggtggtggcagtggtggcggttatggcaatcaagaccagagtggtggaggtggcagcggtggctatggacagcaggaccgtggaggccgcggcaggggtggcagtggtggcggcggcggcggcggcggtggtggttacaaccgcagcagtggtggctatgaacccagaggtcgtggaggtggccgtggaggcagaggtggcatgggcggaagtgaccgtggtggcttcaataaatttggtggccctcgggaccaaggatcacgtcatgactccgaacaggataattcagacaacaacaccatctttgtgcaaggcctgggtgagaatgttacaattgagtctgtggctgattacttcaagcagattggtattattaagacaaacaagaaaacgggacagcccatgattaatttgtacacagacagggaaactggcaagctgaagggagaggcaacggtctcttttgatgacccaccttcagctaaagcagctattgactggtttgatggtaaagaattctccggaaatcctatcaaggtctcatttgctactcgccgggcagactttaatcggggtggtggcaatggtcgtggaggccgagggcgaggaggacccatgggccgtggaggctatggaggtggtggcagtggtggtggtggccgaggaggatttcccagtggaggtggtggcggtggaggacagcagcgagctggtgactggaagtgtcctaatcccacctgtgagaatatgaacttctcttggaggaatgaatgcaaccagtgtaaggcccctaaaccagatggcccaggagggggaccaggtggctctcacatggggggtaactacggggatgatcgtcgtggtggcagaggtggtgcgatcgcaggcgccgattacaaggacgatgatgacaagggagcaccaggaagtgctggttctgctgctggtagtggagcgtgcccggtgccgctgcagctgccgccgctggaacgcctgaccctggatgacaaaaaaccgctgaataccctgatctctgctactggtctgtggatgagtcgtaccggaaccattcataaaatcaaacaccacgaggttagccgttcgaaaatctatattgagatggcgtgtggcgatcatctggttgtgaacaatagccgctcttctcgtacagcacgtgcactgcgtcaccacaaatatcgtaaaacctgtaaacgttgccgtgtgtccgatgaggatctgaacaaattcctgacaaaagccaatgaggaccaaacaagcgtgaaagtgaaagtcgttagcgctcctacccgtactaaaaaagcaatgccgaaatccgttgctcgtgcccctaaaccactggaaaacactgaagcagcacaggcacagccgtctggaagcaaattctctccggccattcctgtttctacccaggagtccgtttctgttccagcaagtgtgagcaccagcattagcagtattagcaccggtgccaccgctagcgccctggttaaaggcaataccaatccgattacaagcatgtctgccccggttcaagcatcagctccagcactgacaaaatcccaaaccgatcgtctggaggttctgctgaatccgaaagacgaaatcagcctgaattccggcaaaccgtttcgtgaactggagagcgaactgctgtcacgtcgtaaaaaagacctgcaacaaatctatgccgaagaacgtgagaactatctggggaaactggaacgtgaaatcacccgctttttcgtggatcgtggctttctggagatcaaatccccgattctgattcctctggagtatatcgagcgtatgggcatcgacaatgataccgaactgagcaaacaaattttccgtgtggataaaaacttctgtctgcgccctatgctggcaccaaatctgtataactatctgcgcaaactggaccgtgccctgcctgatcctatcaaaatcttcgagatcggcccgtgttatcgtaaagagtccgacggtaaagaacatctggaggagtttaccatgctggcctttgcccaaatgggttcaggttgtactcgtgagaacctggaaagcatcatcaccgattttctgaaccacctgggcattgacttcaaaattgtgggcgacagctgtatggtgtatggcgacaccctggatgtcatgcacggcgacctggaactgtctagtgccgttgttggaccaattccgctggaccgtgagtggggtatcgacaaaccgtggatcggagcaggattcggtctggaacgcctgctgaaagtgaaacacgacttcaaaaacatcaaacgtgccgcccgttctgaatcgtattataacgggatctctacgaacctgtaa

SEQ ID NO: 350 - protein, 1016 aa, Artificial Sequence
  Description of Artificial Sequence: Synthetic polypeptide
  EBAG91-29::FUS::PylRS(AA)
MAITQFRLFKFCTCLATVFSFLKRLICRSGAPGSAGSAAGSGMASNDYTQQATQSYGAYPTQPGQGYSQQSSQPYGQQSYSGYSQSTDTSGYGQSSYSSYGQSQNTGYGTQSTPQGYGSTGGYGSSQSSQSSYGQQSSYPGYGQQPAPSSTSGSYGSSSQSSSYGQPQSGSYSQQPSYGGQQQSYGQQQSYNPPQGYGQQNQYNSSSGGGGGGGGGGNYGQDQSSMSSGGGSGGGYGNQDQSGGGGSGGYGQQDRGGRGRGGSGGGGGGGGGGYNRSSGGYEPRGRGGGRGGRGGMGGSDRGGFNKFGGPRDQGSRHDSEQDNSDNNTIFVQGLGENVTIESVADYFKQIGIIKTNKKTGQPMINLYTDRETGKLKGEATVSFDDPPSAKAAIDWFDGKEFSGNPIKVSFATRRADFNRGGGNGRGGRGRGGPMGRGGYGGGGSGGGGRGGFPSGGGGGGGQQRAGDWKCPNPTCENMNFSWRNECNQCKAPKPDGPGGGPGGSHMGGNYGDDRRGGRGGAIAGADYKDDDDKGAPGSAGSAAGSGACPVPLQLPPLERLTLDDKKPLNTLISATGLWMSRTGTIHKIKHHEVSRSKIYIEMACGDHLVVNNSRSSRTARALRHHKYRKTCKRCRVSDEDLNKFLTKANEDQTSVKVKVVSAPTRTKKAMPKSVARAPKPLENTEAAQAQPSGSKFSPAIPVSTQESVSVPASVSTSISSISTGATASALVKGNTNPITSMSAPVQASAPALTKSQTDRLEVLLNPKDEISLNSGKPFRELESELLSRRKKDLQQIYAEERENYLGKLEREITRFFVDRGFLEIKSPILIPLEYIERMGIDNDTELSKQIFRVDKNFCLRPMLAPNLYNYLRKLDRALPDPIKIFEIGPCYRKESDGKEHLEEFTMLAFAQMGSGCTRENLESIITDFLNHLGIDFKIVGDSCMVYGDTLDVMHGDLELSSAVVGPIPLDREWGIDKPWIGAGFGLERLLKVKHDFKNIKRAARSESYYNGISTNL

SEQ ID NO: 351 - DNA, 3051 bp, Artificial Sequence
  Description of Artificial Sequence: Synthetic polynucleotide
  EBAG91-29::FUS::PylRS(AAAF)
atggccatcacccagtttcggttatttaaattttgtacctgcctagcaacagtattctcattcctaaagagattaatatgcagatctggagcacccggctccgccggctccgccgccggctccggcatggcctcaaacgattatacccaacaagcaacccaaagctatggggcctaccccacccagcccgggcagggctattcccagcagagcagtcagccctacggacagcagagttacagtggttatagccagtccacggacacttcaggatatggccagagcagctattcttcttatggccagagccagaacacaggctatggaactcagtcaactccccagggatatggctcgactggcggctatggcagtagccagagctcccaatcgtcttacgggcagcagtcctcctaccctggctatggccagcagccagctcccagcagcacctcgggaagttacggtagcagttctcagagcagcagctatgggcagccccagagtgggagctacagccagcagcctagctatggtggacagcagcaaagctatggacagcagcaaagctataatccccctcagggctatggacagcagaaccagtacaacagcagcagtggtggtggaggtggaggtggaggtggaggtaactatggccaagatcaatcctccatgagtagtggtggtggcagtggtggcggttatggcaatcaagaccagagtggtggaggtggcagcggtggctatggacagcaggaccgtggaggccgcggcaggggtggcagtggtggcggcggcggcggcggcggtggtggttacaaccgcagcagtggtggctatgaacccagaggtcgtggaggtggccgtggaggcagaggtggcatgggcggaagtgaccgtggtggcttcaataaatttggtggccctcgggaccaaggatcacgtcatgactccgaacaggataattcagacaacaacaccatctttgtgcaaggcctgggtgagaatgttacaattgagtctgtggctgattacttcaagcagattggtattattaagacaaacaagaaaacgggacagcccatgattaatttgtacacagacagggaaactggcaagctgaagggagaggcaacggtctcttttgatgacccaccttcagctaaagcagctattgactggtttgatggtaaagaattctccggaaatcctatcaaggtctcatttgctactcgccgggcagactttaatcggggtggtggcaatggtcgtggaggccgagggcgaggaggacccatgggccgtggaggctatggaggtggtggcagtggtggtggtggccgaggaggatttcccagtggaggtggtggcggtggaggacagcagcgagctggtgactggaagtgtcctaatcccacctgtgagaatatgaacttctcttggaggaatgaatgcaaccagtgtaaggcccctaaaccagatggcccaggagggggaccaggtggctctcacatggggggtaactacggggatgatcgtcgtggtggcagaggtggtgcgatcgcaggcgccgattacaaggacgatgatgacaagggagcaccaggaagtgctggttctgctgctggtagtggagcgtgcccggtgccgctgcagctgccgccgctggaacgcctgaccctggatgataaaaaaccgctgaataccctgatctctgctactggtctgtggatgagtcgtaccggaaccattcataaaatcaaacaccacgaggttagccgttcgaaaatctatattgagatggcgtgtggcgatcatctggttgtgaacaatagccgctcttctcgtacagcacgtgcactgcgtcaccacaaatatcgtaaaacctgtaaacgttgccgtgtgtccgatgaggatctgaacaaattcctgacaaaagccaatgaggaccaaacaagcgtgaaagtgaaagtcgttagcgctcctacccgtactaaaaaagcaatgccgaaatccgttgctcgtgcccctaaaccactggaaaacactgaagcagcacaggcacagccgtctggaagcaaattctctccggccattcctgtttctacccaggagtccgtttctgttccagcaagtgtgagcaccagcattagcagtattagcaccggtgccaccgctagcgccctggttaaaggcaataccaatccgattacaagcatgtctgccccggttcaagcatcagctccagcactgacaaaatcccaaaccgatcgtctggaggttctgctgaatccgaaagacgaaatcagcctgaattccggcaaaccgtttcgtgaactggagagcgaactgctgtcacgtcgtaaaaaagacctgcaacaaatctatgccgaagaacgtgagaactatctggggaaactggaacgtgaaatcacccgctttttcgtggatcgtggctttctggagatcaaatccccgattctgattcctctggagtatatcgagcgtatgggcatcgacaatgataccgaactgagcaaacaaattttccgtgtggataaaaacttctgtctgcgccctatgctagcaccaaatctggctaactatctgcgcaaactggaccgtgccctgcctgatcctatcaaaatcttcgagatcggcccgtgttatcgtaaagagtccgacggtaaagaacatctggaggagtttaccatgctggcctttgcccaaatgggttcaggttgtactcgtgagaacctggaaagcatcatcaccgattttctgaaccacctgggcattgacttcaaaattgtgggcgacagctgtatggtgtttggcgacaccctggatgtcatgcacggcgacctggaactgtctagtgccgttgtgggcccaatcccgctggatcgtgagtggggtatcgacaaaccttggatcggtgcgggttttggtctggagcgtctgctgaaagtaaaacacgacttcaagaacatcaaacgtgctgcacgttccgagtcctattacaatggtatttctactaacctgtaa

SEQ ID NO: 352 - protein, 1016 aa, Artificial Sequence
  Description of Artificial Sequence: Synthetic polypeptide
  EBAG91-29::FUS::PylRS(AAAF)
MAITQFRLFKFCTCLATVFSFLKRLICRSGAPGSAGSAAGSGMASNDYTQQATQSYGAYPTQPGQGYSQQSSQPYGQQSYSGYSQSTDTSGYGQSSYSSYGQSQNTGYGTQSTPQGYGSTGGYGSSQSSQSSYGQQSSYPGYGQQPAPSSTSGSYGSSSQSSSYGQPQSGSYSQQPSYGGQQQSYGQQQSYNPPQGYGQQNQYNSSSGGGGGGGGGGNYGQDQSSMSSGGGSGGGYGNQDQSGGGGSGGYGQQDRGGRGRGGSGGGGGGGGGGYNRSSGGYEPRGRGGGRGGRGGMGGSDRGGFNKFGGPRDQGSRHDSEQDNSDNNTIFVQGLGENVTIESVADYFKQIGIIKTNKKTGQPMINLYTDRETGKLKGEATVSFDDPPSAKAAIDWFDGKEFSGNPIKVSFATRRADFNRGGGNGRGGRGRGGPMGRGGYGGGGSGGGGRGGFPSGGGGGGGQQRAGDWKCPNPTCENMNFSWRNECNQCKAPKPDGPGGGPGGSHMGGNYGDDRRGGRGGAIAGADYKDDDDKGAPGSAGSAAGSGACPVPLQLPPLERLTLDDKKPLNTLISATGLWMSRTGTIHKIKHHEVSRSKIYIEMACGDHLVVNNSRSSRTARALRHHKYRKTCKRCRVSDEDLNKFLTKANEDQTSVKVKVVSAPTRTKKAMPKSVARAPKPLENTEAAQAQPSGSKFSPAIPVSTQESVSVPASVSTSISSISTGATASALVKGNTNPITSMSAPVQASAPALTKSQTDRLEVLLNPKDEISLNSGKPFRELESELLSRRKKDLQQIYAEERENYLGKLEREITRFFVDRGFLEIKSPILIPLEYIERMGIDNDTELSKQIFRVDKNFCLRPMLAPNLANYLRKLDRALPDPIKIFEIGPCYRKESDGKEHLEEFTMLAFAQMGSGCTRENLESIITDFLNHLGIDFKIVGDSCMVFGDTLDVMHGDLELSSAVVGPIPLDREWGIDKPWIGAGFGLERLLKVKHDFKNIKRAARSESYYNGISTNL

SEQ ID NO: 353 - DNA, 3465 bp, Artificial Sequence
  Description of Artificial Sequence: Synthetic polynucleotide
  EBAG91-29::FUS::MCP::PylRS(AF)
atggccatcacccagtttcggttatttaaattttgtacctgcctagcaacagtattctcattcctaaagagattaatatgcagatctggagcacccggctccgccggctccgccgccggctccggcatggcctcaaacgattatacccaacaagcaacccaaagctatggggcctaccccacccagcccgggcagggctattcccagcagagcagtcagccctacggacagcagagttacagtggttatagccagtccacggacacttcaggatatggccagagcagctattcttcttatggccagagccagaacacaggctatggaactcagtcaactccccagggatatggctcgactggcggctatggcagtagccagagctcccaatcgtcttacgggcagcagtcctcctaccctggctatggccagcagccagctcccagcagcacctcgggaagttacggtagcagttctcagagcagcagctatgggcagccccagagtgggagctacagccagcagcctagctatggtggacagcagcaaagctatggacagcagcaaagctataatccccctcagggctatggacagcagaaccagtacaacagcagcagtggtggtggaggtggaggtggaggtggaggtaactatggccaagatcaatcctccatgagtagtggtggtggcagtggtggcggttatggcaatcaagaccagagtggtggaggtggcagcggtggctatggacagcaggaccgtggaggccgcggcaggggtggcagtggtggcggcggcggcggcggcggtggtggttacaaccgcagcagtggtggctatgaacccagaggtcgtggaggtggccgtggaggcagaggtggcatgggcggaagtgaccgtggtggcttcaataaatttggtggccctcgggaccaaggatcacgtcatgactccgaacaggataattcagacaacaacaccatctttgtgcaaggcctgggtgagaatgttacaattgagtctgtggctgattacttcaagcagattggtattattaagacaaacaagaaaacgggacagcccatgattaatttgtacacagacagggaaactggcaagctgaagggagaggcaacggtctcttttgatgacccaccttcagctaaagcagctattgactggtttgatggtaaagaattctccggaaatcctatcaaggtctcatttgctactcgccgggcagactttaatcggggtggtggcaatggtcgtggaggccgagggcgaggaggacccatgggccgtggaggctatggaggtggtggcagtggtggtggtggccgaggaggatttcccagtggaggtggtggcggtggaggacagcagcgagctggtgactggaagtgtcctaatcccacctgtgagaatatgaacttctcttggaggaatgaatgcaaccagtgtaaggcccctaaaccagatggcccaggagggggaccaggtggctctcacatggggggtaactacggggatgatcgtcgtggtggcagaggtggtgcgatcgcatatccctatgatgtgccggattatgctggagcaccaggaagtgctggttctgctgctggtagtggagcttctaactttactcagttcgttctcgtcgacaatggcggaactggcgacgtgactgtcgccccaagcaacttcgctaacgggatcgctgaatggatcagctctaactcgcgttcacaggcttacaaagtaacctgtagcgttcgtcagagctctgcgcagaatcgcaaatacaccatcaaagtcgaggtgcctaaaggcgcctggcgttcgtacttaaatatggaactaaccattccaattttcgccacgaattccgactgcgagcttattgttaaggcaatgcaaggtctcctaaaagatggaaacccgattccctcagcaatcgcagcaaactccggcatctacggcgccgattacaaggacgatgatgacaagggagcaccaggaagtgctggttctgctgctggtagtggagcgtgcccggtgccgctgcagctgccgccgctggaacgcctgaccctggatgataaaaaaccgctgaataccctgatctctgctactggtctgtggatgagtcgtaccggaaccattcataaaatcaaacaccacgaggttagccgttcgaaaatctatattgagatggcgtgtggcgatcatctggttgtgaacaatagccgctcttctcgtacagcacgtgcactgcgtcaccacaaatatcgtaaaacctgtaaacgttgccgtgtgtccgatgaggatctgaacaaattcctgacaaaagccaatgaggaccaaacaagcgtgaaagtgaaagtcgttagcgctcctacccgtactaaaaaagcaatgccgaaatccgttgctcgtgcccctaaaccactggaaaacactgaagcagcacaggcacagccgtctggaagcaaattctctccggccattcctgtttctacccaggagtccgtttctgttccagcaagtgtgagcaccagcattagcagtattagcaccggtgccaccgctagcgccctggttaaaggcaataccaatccgattacaagcatgtctgccccggttcaagcatcagctccagcactgacaaaatcccaaaccgatcgtctggaggttctgctgaatccgaaagacgaaatcagcctgaattccggcaaaccgtttcgtgaactggagagcgaactgctgtcacgtcgtaaaaaagacctgcaacaaatctatgccgaagaacgtgagaactatctggggaaactggaacgtgaaatcacccgctttttcgtggatcgtggctttctggagatcaaatccccgattctgattcctctggagtatatcgagcgtatgggcatcgacaatgataccgaactgagcaaacaaattttccgtgtggataaaaacttctgtctgcgccctatgctagcaccaaatctggctaactatctgcgcaaactggaccgtgccctgcctgatcctatcaaaatcttcgagatcggcccgtgttatcgtaaagagtccgacggtaaagaacatctggaggagtttaccatgctgaacttttgccaaatgggttcaggttgtactcgtgagaacctggaaagcatcatcaccgattttctgaaccacctgggcattgacttcaaaattgtgggcgacagctgtatggtgtttggcgacaccctggatgtcatgcacggcgacctggaactgtctagtgccgttgtgggcccaatcccgctggatcgtgagtggggtatcgacaaaccttggatcggtgcgggttttggtctggagcgtctgctgaaagtaaaacacgacttcaagaacatcaaacgtgctgcacgttccgagtcctattacaatggtatttctactaacctgtaa

SEQ ID NO: 354 - protein, 1154 aa, Artificial Sequence
  Description of Artificial Sequence: Synthetic polypeptide
  EBAG91-29::FUS::MCP::PylRS(AF
MAITQFRLFKFCTCLATVFSFLKRLICRSGAPGSAGSAAGSGMASNDYTQQATQSYGAYPTQPGQGYSQQSSQPYGQQSYSGYSQSTDTSGYGQSSYSSYGQSQNTGYGTQSTPQGYGSTGGYGSSQSSQSSYGQQSSYPGYGQQPAPSSTSGSYGSSSQSSSYGQPQSGSYSQQPSYGGQQQSYGQQQSYNPPQGYGQQNQYNSSSGGGGGGGGGGNYGQDQSSMSSGGGSGGGYGNQDQSGGGGSGGYGQQDRGGRGRGGSGGGGGGGGGGYNRSSGGYEPRGRGGGRGGRGGMGGSDRGGFNKFGGPRDQGSRHDSEQDNSDNNTIFVQGLGENVTIESVADYFKQIGIIKTNKKTGQPMINLYTDRETGKLKGEATVSFDDPPSAKAAIDWFDGKEFSGNPIKVSFATRRADFNRGGGNGRGGRGRGGPMGRGGYGGGGSGGGGRGGFPSGGGGGGGQQRAGDWKCPNPTCENMNFSWRNECNQCKAPKPDGPGGGPGGSHMGGNYGDDRRGGRGGAIAYPYDVPDYAGAPGSAGSAAGSGASNFTQFVLVDNGGTGDVTVAPSNFANGIAEWISSNSRSQAYKVTCSVRQSSAQNRKYTIKVEVPKGAWRSYLNMELTIPIFATNSDCELIVKAMQGLLKDGNPIPSAIAANSGIYGADYKDDDDKGAPGSAGSAAGSGACPVPLQLPPLERLTLDDKKPLNTLISATGLWMSRTGTIHKIKHHEVSRSKIYIEMACGDHLVVNNSRSSRTARALRHHKYRKTCKRCRVSDEDLNKFLTKANEDQTSVKVKVVSAPTRTKKAMPKSVARAPKPLENTEAAQAQPSGSKFSPAIPVSTQESVSVPASVSTSISSISTGATASALVKGNTNPITSMSAPVQASAPALTKSQTDRLEVLLNPKDEISLNSGKPFRELESELLSRRKKDLQQIYAEERENYLGKLEREITRFFVDRGFLEIKSPILIPLEYIERMGIDNDTELSKQIFRVDKNFCLRPMLAPNLANYLRKLDRALPDPIKIFEIGPCYRKESDGKEHLEEFTMLNFCQMGSGCTRENLESIITDFLNHLGIDFKIVGDSCMVFGDTLDVMHGDLELSSAVVGPIPLDREWGIDKPWIGAGFGLERLLKVKHDFKNIKRAARSESYYNGISTNL

SEQ ID NO: 355 - DNA, 2751 bp, Artificial Sequence
  Description of Artificial Sequence: Synthetic polynucleotide
  CG1::PylRS(AF)
atggccatttgtcaattcttccttcaaggccggtgccgctttggagatcggtgctggaacgaacatcccggtgctaggggtgcaggaggaggacggcagcaaccgcagcagcagccttcaggtaataatagacgtggatggaatacaactagccagagatattccaatgtcatccagccatccagtttctccaaatccacaccatgggggggcagcagagatcaagaaaagccatatttcagttcttttgattctggagcttcaactaacaggaaggaaggctttggattgtctgagaacccatttgcttcacttagtcctgatgagcagaaagatgaaaagaaacttctggaaggaattgtaaaagatatggaggtttgggaatcatcagggcagtggatgttttctgtttattcaccagtgaaaaagaaacctaatatttcaggttttacagacatttcaccagaggaattgaggcttgaataccataacttcttaaccagcaataacttacagagttatctaaattctgtccaacgtttaataaatcaatggaggaacagggtaaatgaactgaaaagtctaaatatatcaactaaagtagctttgctctctgatgtaaaggatggagtaaatcaagcagcacctgcatttggatttggcagcagtcaagcagcaacatttatgtcgccaggctttccagtcaataacagcagcagtgataatgctcagaactttagttttaaaacaaactctggatttgctgctgcctcttctggaagccctgctggttttgggagttccccagcatttggagctgcagcctctaccagttcaggtatctctacttctgctccagcttttggatttgggaagcctgaagtcacatcggctgcatcattttcattcaaaagccctgcagcttccagttttggatcacctggattttcaggacttccagcttccttggcaacaggtcctgtcagagctccagtggccccagcctttggaggtggcagttctgtggctggttttggtagtccgggctcacattctcacactgctttttctaagccatccagtgacacttttggaaatagcagcatatccacttctctgtcagcctcaagcagcatcattgcaacagataatgtgttattcacacccagagataaactaacagtagaagaactggaacaatttcaatccaagaaatttactctgggaaaaattccattaaagcctccacctctggaacttctaaatgttggcgccgattacaaggacgatgatgacaagggagcaccaggaagtgctggttctgctgctggtagtggagcgtgcccggtgccgctgcagctgccgccgctggaacgcctgaccctggatgataaaaaaccgctgaataccctgatctctgctactggtctgtggatgagtcgtaccggaaccattcataaaatcaaacaccacgaggttagccgttcgaaaatctatattgagatggcgtgtggcgatcatctggttgtgaacaatagccgctcttctcgtacagcacgtgcactgcgtcaccacaaatatcgtaaaacctgtaaacgttgccgtgtgtccgatgaggatctgaacaaattcctgacaaaagccaatgaggaccaaacaagcgtgaaagtgaaagtcgttagcgctcctacccgtactaaaaaagcaatgccgaaatccgttgctcgtgcccctaaaccactggaaaacactgaagcagcacaggcacagccgtctggaagcaaattctctccggccattcctgtttctacccaggagtccgtttctgttccagcaagtgtgagcaccagcattagcagtattagcaccggtgccaccgctagcgccctggttaaaggcaataccaatccgattacaagcatgtctgccccggttcaagcatcagctccagcactgacaaaatcccaaaccgatcgtctggaggttctgctgaatccgaaagacgaaatcagcctgaattccggcaaaccgtttcgtgaactggagagcgaactgctgtcacgtcgtaaaaaagacctgcaacaaatctatgccgaagaacgtgagaactatctggggaaactggaacgtgaaatcacccgctttttcgtggatcgtggctttctggagatcaaatccccgattctgattcctctggagtatatcgagcgtatgggcatcgacaatgataccgaactgagcaaacaaattttccgtgtggataaaaacttctgtctgcgccctatgctagcaccaaatctggctaactatctgcgcaaactggaccgtgccctgcctgatcctatcaaaatcttcgagatcggcccgtgttatcgtaaagagtccgacggtaaagaacatctggaggagtttaccatgctgaacttttgccaaatgggttcaggttgtactcgtgagaacctggaaagcatcatcaccgattttctgaaccacctgggcattgacttcaaaattgtgggcgacagctgtatggtgtttggcgacaccctggatgtcatgcacggcgacctggaactgtctagtgccgttgtgggcccaatcccgctggatcgtgagtggggtatcgacaaaccttggatcggtgcgggttttggtctggagcgtctgctgaaagtaaaacacgacttcaagaacatcaaacgtgctgcacgttccgagtcctattacaatggtatttctactaacctgtaa

SEQ ID NO: 356 - protein, 916 aa, Artificial Sequence
  Description of Artificial Sequence: Synthetic polypeptide
  CG1::PylRS(AF)
MAICQFFLQGRCRFGDRCWNEHPGARGAGGGRQQPQQQPSGNNRRGWNTTSQRYSNVIQPSSFSKSTPWGGSRDQEKPYFSSFDSGASTNRKEGFGLSENPFASLSPDEQKDEKKLLEGIVKDMEVWESSGQWMFSVYSPVKKKPNISGFTDISPEELRLEYHNFLTSNNLQSYLNSVQRLINQWRNRVNELKSLNISTKVALLSDVKDGVNQAAPAFGFGSSQAATFMSPGFPVNNSSSDNAQNFSFKTNSGFAAASSGSPAGFGSSPAFGAAASTSSGISTSAPAFGFGKPEVTSAASFSFKSPAASSFGSPGFSGLPASLATGPVRAPVAPAFGGGSSVAGFGSPGSHSHTAFSKPSSDTFGNSSISTSLSASSSIIATDNVLFTPRDKLTVEELEQFQSKKFTLGKIPLKPPPLELLNVGADYKDDDDKGAPGSAGSAAGSGACPVPLQLPPLERLTLDDKKPLNTLISATGLWMSRTGTIHKIKHHEVSRSKIYIEMACGDHLVVNNSRSSRTARALRHHKYRKTCKRCRVSDEDLNKFLTKANEDQTSVKVKVVSAPTRTKKAMPKSVARAPKPLENTEAAQAQPSGSKFSPAIPVSTQESVSVPASVSTSISSISTGATASALVKGNTNPITSMSAPVQASAPALTKSQTDRLEVLLNPKDEISLNSGKPFRELESELLSRRKKDLQQIYAEERENYLGKLEREITRFFVDRGFLEIKSPILIPLEYIERMGIDNDTELSKQIFRVDKNFCLRPMLAPNLANYLRKLDRALPDPIKIFEIGPCYRKESDGKEHLEEFTMLNFCQMGSGCTRENLESIITDFLNHLGIDFKIVGDSCMVFGDTLDVMHGDLELSSAVVGPIPLDREWGIDKPWIGAGFGLERLLKVKHDFKNIKRAARSESYYNGISTNL

SEQ ID NO: 357 - DNA, 2751 bp, Artificial Sequence
  Description of Artificial Sequence: Synthetic polynucleotide
  CG1::PylRS(AA)
atggccatttgtcaattcttccttcaaggccggtgccgctttggagatcggtgctggaacgaacatcccggtgctaggggtgcaggaggaggacggcagcaaccgcagcagcagccttcaggtaataatagacgtggatggaatacaactagccagagatattccaatgtcatccagccatccagtttctccaaatccacaccatgggggggcagcagagatcaagaaaagccatatttcagttcttttgattctggagcttcaactaacaggaaggaaggctttggattgtctgagaacccatttgcttcacttagtcctgatgagcagaaagatgaaaagaaacttctggaaggaattgtaaaagatatggaggtttgggaatcatcagggcagtggatgttttctgtttattcaccagtgaaaaagaaacctaatatttcaggttttacagacatttcaccagaggaattgaggcttgaataccataacttcttaaccagcaataacttacagagttatctaaattctgtccaacgtttaataaatcaatggaggaacagggtaaatgaactgaaaagtctaaatatatcaactaaagtagctttgctctctgatgtaaaggatggagtaaatcaagcagcacctgcatttggatttggcagcagtcaagcagcaacatttatgtcgccaggctttccagtcaataacagcagcagtgataatgctcagaactttagttttaaaacaaactctggatttgctgctgcctcttctggaagccctgctggttttgggagttccccagcatttggagctgcagcctctaccagttcaggtatctctacttctgctccagcttttggatttgggaagcctgaagtcacatcggctgcatcattttcattcaaaagccctgcagcttccagttttggatcacctggattttcaggacttccagcttccttggcaacaggtcctgtcagagctccagtggccccagcctttggaggtggcagttctgtggctggttttggtagtccgggctcacattctcacactgctttttctaagccatccagtgacacttttggaaatagcagcatatccacttctctgtcagcctcaagcagcatcattgcaacagataatgtgttattcacacccagagataaactaacagtagaagaactggaacaatttcaatccaagaaatttactctgggaaaaattccattaaagcctccacctctggaacttctaaatgttggcgccgattacaaggacgatgatgacaagggagcaccaggaagtgctggttctgctgctggtagtggagcgtgcccggtgccgctgcagctgccgccgctggaacgcctgaccctggatgacaaaaaaccgctgaataccctgatctctgctactggtctgtggatgagtcgtaccggaaccattcataaaatcaaacaccacgaggttagccgttcgaaaatctatattgagatggcgtgtggcgatcatctggttgtgaacaatagccgctcttctcgtacagcacgtgcactgcgtcaccacaaatatcgtaaaacctgtaaacgttgccgtgtgtccgatgaggatctgaacaaattcctgacaaaagccaatgaggaccaaacaagcgtgaaagtgaaagtcgttagcgctcctacccgtactaaaaaagcaatgccgaaatccgttgctcgtgcccctaaaccactggaaaacactgaagcagcacaggcacagccgtctggaagcaaattctctccggccattcctgtttctacccaggagtccgtttctgttccagcaagtgtgagcaccagcattagcagtattagcaccggtgccaccgctagcgccctggttaaaggcaataccaatccgattacaagcatgtctgccccggttcaagcatcagctccagcactgacaaaatcccaaaccgatcgtctggaggttctgctgaatccgaaagacgaaatcagcctgaattccggcaaaccgtttcgtgaactggagagcgaactgctgtcacgtcgtaaaaaagacctgcaacaaatctatgccgaagaacgtgagaactatctggggaaactggaacgtgaaatcacccgctttttcgtggatcgtggctttctggagatcaaatccccgattctgattcctctggagtatatcgagcgtatgggcatcgacaatgataccgaactgagcaaacaaattttccgtgtggataaaaacttctgtctgcgccctatgctggcaccaaatctgtataactatctgcgcaaactggaccgtgccctgcctgatcctatcaaaatcttcgagatcggcccgtgttatcgtaaagagtccgacggtaaagaacatctggaggagtttaccatgctggcctttgcccaaatgggttcaggttgtactcgtgagaacctggaaagcatcatcaccgattttctgaaccacctgggcattgacttcaaaattgtgggcgacagctgtatggtgtatggcgacaccctggatgtcatgcacggcgacctggaactgtctagtgccgttgttggaccaattccgctggaccgtgagtggggtatcgacaaaccgtggatcggagcaggattcggtctggaacgcctgctgaaagtgaaacacgacttcaaaaacatcaaacgtgccgcccgttctgaatcgtattataacgggatctctacgaacctgtaa

SEQ ID NO: 358 - protein, 916 aa, Artificial Sequence
  Description of Artificial Sequence: Synthetic polypeptide
  CG1::PylRS(AA)
MAICQFFLQGRCRFGDRCWNEHPGARGAGGGRQQPQQQPSGNNRRGWNTTSQRYSNVIQPSSFSKSTPWGGSRDQEKPYFSSFDSGASTNRKEGFGLSENPFASLSPDEQKDEKKLLEGIVKDMEVWESSGQWMFSVYSPVKKKPNISGFTDISPEELRLEYHNFLTSNNLQSYLNSVQRLINQWRNRVNELKSLNISTKVALLSDVKDGVNQAAPAFGFGSSQAATFMSPGFPVNNSSSDNAQNFSFKTNSGFAAASSGSPAGFGSSPAFGAAASTSSGISTSAPAFGFGKPEVTSAASFSFKSPAASSFGSPGFSGLPASLATGPVRAPVAPAFGGGSSVAGFGSPGSHSHTAFSKPSSDTFGNSSISTSLSASSSIIATDNVLFTPRDKLTVEELEQFQSKKFTLGKIPLKPPPLELLNVGADYKDDDDKGAPGSAGSAAGSGACPVPLQLPPLERLTLDDKKPLNTLISATGLWMSRTGTIHKIKHHEVSRSKIYIEMACGDHLVVNNSRSSRTARALRHHKYRKTCKRCRVSDEDLNKFLTKANEDQTSVKVKVVSAPTRTKKAMPKSVARAPKPLENTEAAQAQPSGSKFSPAIPVSTQESVSVPASVSTSISSISTGATASALVKGNTNPITSMSAPVQASAPALTKSQTDRLEVLLNPKDEISLNSGKPFRELESELLSRRKKDLQQIYAEERENYLGKLEREITRFFVDRGFLEIKSPILIPLEYIERMGIDNDTELSKQIFRVDKNFCLRPMLAPNLYNYLRKLDRALPDPIKIFEIGPCYRKESDGKEHLEEFTMLAFAQMGSGCTRENLESIITDFLNHLGIDFKIVGDSCMVYGDTLDVMHGDLELSSAVVGPIPLDREWGIDKPWIGAGFGLERLLKVKHDFKNIKRAARSESYYNGISTNL

SEQ ID NO: 359 - DNA, 2751 bp, Artificial Sequence
  Description of Artificial Sequence: Synthetic polynucleotide
  CG1::PylRS(AAAF)
atggccatttgtcaattcttccttcaaggccggtgccgctttggagatcggtgctggaacgaacatcccggtgctaggggtgcaggaggaggacggcagcaaccgcagcagcagccttcaggtaataatagacgtggatggaatacaactagccagagatattccaatgtcatccagccatccagtttctccaaatccacaccatgggggggcagcagagatcaagaaaagccatatttcagttcttttgattctggagcttcaactaacaggaaggaaggctttggattgtctgagaacccatttgcttcacttagtcctgatgagcagaaagatgaaaagaaacttctggaaggaattgtaaaagatatggaggtttgggaatcatcagggcagtggatgttttctgtttattcaccagtgaaaaagaaacctaatatttcaggttttacagacatttcaccagaggaattgaggcttgaataccataacttcttaaccagcaataacttacagagttatctaaattctgtccaacgtttaataaatcaatggaggaacagggtaaatgaactgaaaagtctaaatatatcaactaaagtagctttgctctctgatgtaaaggatggagtaaatcaagcagcacctgcatttggatttggcagcagtcaagcagcaacatttatgtcgccaggctttccagtcaataacagcagcagtgataatgctcagaactttagttttaaaacaaactctggatttgctgctgcctcttctggaagccctgctggttttgggagttccccagcatttggagctgcagcctctaccagttcaggtatctctacttctgctccagcttttggatttgggaagcctgaagtcacatcggctgcatcattttcattcaaaagccctgcagcttccagttttggatcacctggattttcaggacttccagcttccttggcaacaggtcctgtcagagctccagtggccccagcctttggaggtggcagttctgtggctggttttggtagtccgggctcacattctcacactgctttttctaagccatccagtgacacttttggaaatagcagcatatccacttctctgtcagcctcaagcagcatcattgcaacagataatgtgttattcacacccagagataaactaacagtagaagaactggaacaatttcaatccaagaaatttactctgggaaaaattccattaaagcctccacctctggaacttctaaatgttggcgccgattacaaggacgatgatgacaagggagcaccaggaagtgctggttctgctgctggtagtggagcgtgcccggtgccgctgcagctgccgccgctggaacgcctgaccctggatgataaaaaaccgctgaataccctgatctctgctactggtctgtggatgagtcgtaccggaaccattcataaaatcaaacaccacgaggttagccgttcgaaaatctatattgagatggcgtgtggcgatcatctggttgtgaacaatagccgctcttctcgtacagcacgtgcactgcgtcaccacaaatatcgtaaaacctgtaaacgttgccgtgtgtccgatgaggatctgaacaaattcctgacaaaagccaatgaggaccaaacaagcgtgaaagtgaaagtcgttagcgctcctacccgtactaaaaaagcaatgccgaaatccgttgctcgtgcccctaaaccactggaaaacactgaagcagcacaggcacagccgtctggaagcaaattctctccggccattcctgtttctacccaggagtccgtttctgttccagcaagtgtgagcaccagcattagcagtattagcaccggtgccaccgctagcgccctggttaaaggcaataccaatccgattacaagcatgtctgccccggttcaagcatcagctccagcactgacaaaatcccaaaccgatcgtctggaggttctgctgaatccgaaagacgaaatcagcctgaattccggcaaaccgtttcgtgaactggagagcgaactgctgtcacgtcgtaaaaaagacctgcaacaaatctatgccgaagaacgtgagaactatctggggaaactggaacgtgaaatcacccgctttttcgtggatcgtggctttctggagatcaaatccccgattctgattcctctggagtatatcgagcgtatgggcatcgacaatgataccgaactgagcaaacaaattttccgtgtggataaaaacttctgtctgcgccctatgctagcaccaaatctggctaactatctgcgcaaactggaccgtgccctgcctgatcctatcaaaatcttcgagatcggcccgtgttatcgtaaagagtccgacggtaaagaacatctggaggagtttaccatgctggcctttgcccaaatgggttcaggttgtactcgtgagaacctggaaagcatcatcaccgattttctgaaccacctgggcattgacttcaaaattgtgggcgacagctgtatggtgtttggcgacaccctggatgtcatgcacggcgacctggaactgtctagtgccgttgtgggcccaatcccgctggatcgtgagtggggtatcgacaaaccttggatcggtgcgggttttggtctggagcgtctgctgaaagtaaaacacgacttcaagaacatcaaacgtgctgcacgttccgagtcctattacaatggtatttctactaacctgtaa

SEQ ID NO: 360 - protein, 916 aa, Artificial Sequence
  Description of Artificial Sequence: Synthetic polypeptide
  CG1::PylRS(AAAF)
MAICQFFLQGRCRFGDRCWNEHPGARGAGGGRQQPQQQPSGNNRRGWNTTSQRYSNVIQPSSFSKSTPWGGSRDQEKPYFSSFDSGASTNRKEGFGLSENPFASLSPDEQKDEKKLLEGIVKDMEVWESSGQWMFSVYSPVKKKPNISGFTDISPEELRLEYHNFLTSNNLQSYLNSVQRLINQWRNRVNELKSLNISTKVALLSDVKDGVNQAAPAFGFGSSQAATFMSPGFPVNNSSSDNAQNFSFKTNSGFAAASSGSPAGFGSSPAFGAAASTSSGISTSAPAFGFGKPEVTSAASFSFKSPAASSFGSPGFSGLPASLATGPVRAPVAPAFGGGSSVAGFGSPGSHSHTAFSKPSSDTFGNSSISTSLSASSSIIATDNVLFTPRDKLTVEELEQFQSKKFTLGKIPLKPPPLELLNVGADYKDDDDKGAPGSAGSAAGSGACPVPLQLPPLERLTLDDKKPLNTLISATGLWMSRTGTIHKIKHHEVSRSKIYIEMACGDHLVVNNSRSSRTARALRHHKYRKTCKRCRVSDEDLNKFLTKANEDQTSVKVKVVSAPTRTKKAMPKSVARAPKPLENTEAAQAQPSGSKFSPAIPVSTQESVSVPASVSTSISSISTGATASALVKGNTNPITSMSAPVQASAPALTKSQTDRLEVLLNPKDEISLNSGKPFRELESELLSRRKKDLQQIYAEERENYLGKLEREITRFFVDRGFLEIKSPILIPLEYIERMGIDNDTELSKQIFRVDKNFCLRPMLAPNLANYLRKLDRALPDPIKIFEIGPCYRKESDGKEHLEEFTMLAFAQMGSGCTRENLESIITDFLNHLGIDFKIVGDSCMVFGDTLDVMHGDLELSSAVVGPIPLDREWGIDKPWIGAGFGLERLLKVKHDFKNIKRAARSESYYNGISTNL

SEQ ID NO: 361 - DNA, 4233 bp, Artificial Sequence
  Description of Artificial Sequence: Synthetic polynucleotide
  CG1::FUS::PylRS(AA)
atggccatttgtcaattcttccttcaaggccggtgccgctttggagatcggtgctggaacgaacatcccggtgctaggggtgcaggaggaggacggcagcaaccgcagcagcagccttcaggtaataatagacgtggatggaatacaactagccagagatattccaatgtcatccagccatccagtttctccaaatccacaccatgggggggcagcagagatcaagaaaagccatatttcagttcttttgattctggagcttcaactaacaggaaggaaggctttggattgtctgagaacccatttgcttcacttagtcctgatgagcagaaagatgaaaagaaacttctggaaggaattgtaaaagatatggaggtttgggaatcatcagggcagtggatgttttctgtttattcaccagtgaaaaagaaacctaatatttcaggttttacagacatttcaccagaggaattgaggcttgaataccataacttcttaaccagcaataacttacagagttatctaaattctgtccaacgtttaataaatcaatggaggaacagggtaaatgaactgaaaagtctaaatatatcaactaaagtagctttgctctctgatgtaaaggatggagtaaatcaagcagcacctgcatttggatttggcagcagtcaagcagcaacatttatgtcgccaggctttccagtcaataacagcagcagtgataatgctcagaactttagttttaaaacaaactctggatttgctgctgcctcttctggaagccctgctggttttgggagttccccagcatttggagctgcagcctctaccagttcaggtatctctacttctgctccagcttttggatttgggaagcctgaagtcacatcggctgcatcattttcattcaaaagccctgcagcttccagttttggatcacctggattttcaggacttccagcttccttggcaacaggtcctgtcagagctccagtggccccagcctttggaggtggcagttctgtggctggttttggtagtccgggctcacattctcacactgctttttctaagccatccagtgacacttttggaaatagcagcatatccacttctctgtcagcctcaagcagcatcattgcaacagataatgtgttattcacacccagagataaactaacagtagaagaactggaacaatttcaatccaagaaatttactctgggaaaaattccattaaagcctccacctctggaacttctaaatgttggagcacccggctccgccggctccgccgccggctccggcatggcctcaaacgattatacccaacaagcaacccaaagctatggggcctaccccacccagcccgggcagggctattcccagcagagcagtcagccctacggacagcagagttacagtggttatagccagtccacggacacttcaggatatggccagagcagctattcttcttatggccagagccagaacacaggctatggaactcagtcaactccccagggatatggctcgactggcggctatggcagtagccagagctcccaatcgtcttacgggcagcagtcctcctaccctggctatggccagcagccagctcccagcagcacctcgggaagttacggtagcagttctcagagcagcagctatgggcagccccagagtgggagctacagccagcagcctagctatggtggacagcagcaaagctatggacagcagcaaagctataatccccctcagggctatggacagcagaaccagtacaacagcagcagtggtggtggaggtggaggtggaggtggaggtaactatggccaagatcaatcctccatgagtagtggtggtggcagtggtggcggttatggcaatcaagaccagagtggtggaggtggcagcggtggctatggacagcaggaccgtggaggccgcggcaggggtggcagtggtggcggcggcggcggcggcggtggtggttacaaccgcagcagtggtggctatgaacccagaggtcgtggaggtggccgtggaggcagaggtggcatgggcggaagtgaccgtggtggcttcaataaatttggtggccctcgggaccaaggatcacgtcatgactccgaacaggataattcagacaacaacaccatctttgtgcaaggcctgggtgagaatgttacaattgagtctgtggctgattacttcaagcagattggtattattaagacaaacaagaaaacgggacagcccatgattaatttgtacacagacagggaaactggcaagctgaagggagaggcaacggtctcttttgatgacccaccttcagctaaagcagctattgactggtttgatggtaaagaattctccggaaatcctatcaaggtctcatttgctactcgccgggcagactttaatcggggtggtggcaatggtcgtggaggccgagggcgaggaggacccatgggccgtggaggctatggaggtggtggcagtggtggtggtggccgaggaggatttcccagtggaggtggtggcggtggaggacagcagcgagctggtgactggaagtgtcctaatcccacctgtgagaatatgaacttctcttggaggaatgaatgcaaccagtgtaaggcccctaaaccagatggcccaggagggggaccaggtggctctcacatggggggtaactacggggatgatcgtcgtggtggcagaggtggtgcgatcgcaggcgccgattacaaggacgatgatgacaagggagcaccaggaagtgctggttctgctgctggtagtggagcgtgcccggtgccgctgcagctgccgccgctggaacgcctgaccctggatgacaaaaaaccgctgaataccctgatctctgctactggtctgtggatgagtcgtaccggaaccattcataaaatcaaacaccacgaggttagccgttcgaaaatctatattgagatggcgtgtggcgatcatctggttgtgaacaatagccgctcttctcgtacagcacgtgcactgcgtcaccacaaatatcgtaaaacctgtaaacgttgccgtgtgtccgatgaggatctgaacaaattcctgacaaaagccaatgaggaccaaacaagcgtgaaagtgaaagtcgttagcgctcctacccgtactaaaaaagcaatgccgaaatccgttgctcgtgcccctaaaccactggaaaacactgaagcagcacaggcacagccgtctggaagcaaattctctccggccattcctgtttctacccaggagtccgtttctgttccagcaagtgtgagcaccagcattagcagtattagcaccggtgccaccgctagcgccctggttaaaggcaataccaatccgattacaagcatgtctgccccggttcaagcatcagctccagcactgacaaaatcccaaaccgatcgtctggaggttctgctgaatccgaaagacgaaatcagcctgaattccggcaaaccgtttcgtgaactggagagcgaactgctgtcacgtcgtaaaaaagacctgcaacaaatctatgccgaagaacgtgagaactatctggggaaactggaacgtgaaatcacccgctttttcgtggatcgtggctttctggagatcaaatccccgattctgattcctctggagtatatcgagcgtatgggcatcgacaatgataccgaactgagcaaacaaattttccgtgtggataaaaacttctgtctgcgccctatgctggcaccaaatctgtataactatctgcgcaaactggaccgtgccctgcctgatcctatcaaaatcttcgagatcggcccgtgttatcgtaaagagtccgacggtaaagaacatctggaggagtttaccatgctggcctttgcccaaatgggttcaggttgtactcgtgagaacctggaaagcatcatcaccgattttctgaaccacctgggcattgacttcaaaattgtgggcgacagctgtatggtgtatggcgacaccctggatgtcatgcacggcgacctggaactgtctagtgccgttgttggaccaattccgctggaccgtgagtggggtatcgacaaaccgtggatcggagcaggattcggtctggaacgcctgctgaaagtgaaacacgacttcaaaaacatcaaacgtgccgcccgttctgaatcgtattataacgggatctctacgaacctgtaa

SEQ ID NO: 362 - protein, 1410 aa, Artificial Sequence
  Description of Artificial Sequence: Synthetic polypeptide
  CG1::FUS::PylRS(AA)
MAICQFFLQGRCRFGDRCWNEHPGARGAGGGRQQPQQQPSGNNRRGWNTTSQRYSNVIQPSSFSKSTPWGGSRDQEKPYFSSFDSGASTNRKEGFGLSENPFASLSPDEQKDEKKLLEGIVKDMEVWESSGQWMFSVYSPVKKKPNISGFTDISPEELRLEYHNFLTSNNLQSYLNSVQRLINQWRNRVNELKSLNISTKVALLSDVKDGVNQAAPAFGFGSSQAATFMSPGFPVNNSSSDNAQNFSFKTNSGFAAASSGSPAGFGSSPAFGAAASTSSGISTSAPAFGFGKPEVTSAASFSFKSPAASSFGSPGFSGLPASLATGPVRAPVAPAFGGGSSVAGFGSPGSHSHTAFSKPSSDTFGNSSISTSLSASSSIIATDNVLFTPRDKLTVEELEQFQSKKFTLGKIPLKPPPLELLNVGAPGSAGSAAGSGMASNDYTQQATQSYGAYPTQPGQGYSQQSSQPYGQQSYSGYSQSTDTSGYGQSSYSSYGQSQNTGYGTQSTPQGYGSTGGYGSSQSSQSSYGQQSSYPGYGQQPAPSSTSGSYGSSSQSSSYGQPQSGSYSQQPSYGGQQQSYGQQQSYNPPQGYGQQNQYNSSSGGGGGGGGGGNYGQDQSSMSSGGGSGGGYGNQDQSGGGGSGGYGQQDRGGRGRGGSGGGGGGGGGGYNRSSGGYEPRGRGGGRGGRGGMGGSDRGGFNKFGGPRDQGSRHDSEQDNSDNNTIFVQGLGENVTIESVADYFKQIGIIKTNKKTGQPMINLYTDRETGKLKGEATVSFDDPPSAKAAIDWFDGKEFSGNPIKVSFATRRADFNRGGGNGRGGRGRGGPMGRGGYGGGGSGGGGRGGFPSGGGGGGGQQRAGDWKCPNPTCENMNFSWRNECNQCKAPKPDGPGGGPGGSHMGGNYGDDRRGGRGGAIAGADYKDDDDKGAPGSAGSAAGSGACPVPLQLPPLERLTLDDKKPLNTLISATGLWMSRTGTIHKIKHHEVSRSKIYIEMACGDHLVVNNSRSSRTARALRHHKYRKTCKRCRVSDEDLNKFLTKANEDQTSVKVKVVSAPTRTKKAMPKSVARAPKPLENTEAAQAQPSGSKFSPAIPVSTQESVSVPASVSTSISSISTGATASALVKGNTNPITSMSAPVQASAPALTKSQTDRLEVLLNPKDEISLNSGKPFRELESELLSRRKKDLQQIYAEERENYLGKLEREITRFFVDRGFLEIKSPILIPLEYIERMGIDNDTELSKQIFRVDKNFCLRPMLAPNLYNYLRKLDRALPDPIKIFEIGPCYRKESDGKEHLEEFTMLAFAQMGSGCTRENLESIITDFLNHLGIDFKIVGDSCMVYGDTLDVMHGDLELSSAVVGPIPLDREWGIDKPWIGAGFGLERLLKVKHDFKNIKRAARSESYYNGISTNL

SEQ ID NO: 363 - DNA, 4233 bp, Artificial Sequence
  Description of Artificial Sequence: Synthetic polynucleotide
  CG1::FUS::PylRS(AAAF)
atggccatttgtcaattcttccttcaaggccggtgccgctttggagatcggtgctggaacgaacatcccggtgctaggggtgcaggaggaggacggcagcaaccgcagcagcagccttcaggtaataatagacgtggatggaatacaactagccagagatattccaatgtcatccagccatccagtttctccaaatccacaccatgggggggcagcagagatcaagaaaagccatatttcagttcttttgattctggagcttcaactaacaggaaggaaggctttggattgtctgagaacccatttgcttcacttagtcctgatgagcagaaagatgaaaagaaacttctggaaggaattgtaaaagatatggaggtttgggaatcatcagggcagtggatgttttctgtttattcaccagtgaaaaagaaacctaatatttcaggttttacagacatttcaccagaggaattgaggcttgaataccataacttcttaaccagcaataacttacagagttatctaaattctgtccaacgtttaataaatcaatggaggaacagggtaaatgaactgaaaagtctaaatatatcaactaaagtagctttgctctctgatgtaaaggatggagtaaatcaagcagcacctgcatttggatttggcagcagtcaagcagcaacatttatgtcgccaggctttccagtcaataacagcagcagtgataatgctcagaactttagttttaaaacaaactctggatttgctgctgcctcttctggaagccctgctggttttgggagttccccagcatttggagctgcagcctctaccagttcaggtatctctacttctgctccagcttttggatttgggaagcctgaagtcacatcggctgcatcattttcattcaaaagccctgcagcttccagttttggatcacctggattttcaggacttccagcttccttggcaacaggtcctgtcagagctccagtggccccagcctttggaggtggcagttctgtggctggttttggtagtccgggctcacattctcacactgctttttctaagccatccagtgacacttttggaaatagcagcatatccacttctctgtcagcctcaagcagcatcattgcaacagataatgtgttattcacacccagagataaactaacagtagaagaactggaacaatttcaatccaagaaatttactctgggaaaaattccattaaagcctccacctctggaacttctaaatgttggagcacccggctccgccggctccgccgccggctccggcatggcctcaaacgattatacccaacaagcaacccaaagctatggggcctaccccacccagcccgggcagggctattcccagcagagcagtcagccctacggacagcagagttacagtggttatagccagtccacggacacttcaggatatggccagagcagctattcttcttatggccagagccagaacacaggctatggaactcagtcaactccccagggatatggctcgactggcggctatggcagtagccagagctcccaatcgtcttacgggcagcagtcctcctaccctggctatggccagcagccagctcccagcagcacctcgggaagttacggtagcagttctcagagcagcagctatgggcagccccagagtgggagctacagccagcagcctagctatggtggacagcagcaaagctatggacagcagcaaagctataatccccctcagggctatggacagcagaaccagtacaacagcagcagtggtggtggaggtggaggtggaggtggaggtaactatggccaagatcaatcctccatgagtagtggtggtggcagtggtggcggttatggcaatcaagaccagagtggtggaggtggcagcggtggctatggacagcaggaccgtggaggccgcggcaggggtggcagtggtggcggcggcggcggcggcggtggtggttacaaccgcagcagtggtggctatgaacccagaggtcgtggaggtggccgtggaggcagaggtggcatgggcggaagtgaccgtggtggcttcaataaatttggtggccctcgggaccaaggatcacgtcatgactccgaacaggataattcagacaacaacaccatctttgtgcaaggcctgggtgagaatgttacaattgagtctgtggctgattacttcaagcagattggtattattaagacaaacaagaaaacgggacagcccatgattaatttgtacacagacagggaaactggcaagctgaagggagaggcaacggtctcttttgatgacccaccttcagctaaagcagctattgactggtttgatggtaaagaattctccggaaatcctatcaaggtctcatttgctactcgccgggcagactttaatcggggtggtggcaatggtcgtggaggccgagggcgaggaggacccatgggccgtggaggctatggaggtggtggcagtggtggtggtggccgaggaggatttcccagtggaggtggtggcggtggaggacagcagcgagctggtgactggaagtgtcctaatcccacctgtgagaatatgaacttctcttggaggaatgaatgcaaccagtgtaaggcccctaaaccagatggcccaggagggggaccaggtggctctcacatggggggtaactacggggatgatcgtcgtggtggcagaggtggtgcgatcgcaggcgccgattacaaggacgatgatgacaagggagcaccaggaagtgctggttctgctgctggtagtggagcgtgcccggtgccgctgcagctgccgccgctggaacgcctgaccctggatgataaaaaaccgctgaataccctgatctctgctactggtctgtggatgagtcgtaccggaaccattcataaaatcaaacaccacgaggttagccgttcgaaaatctatattgagatggcgtgtggcgatcatctggttgtgaacaatagccgctcttctcgtacagcacgtgcactgcgtcaccacaaatatcgtaaaacctgtaaacgttgccgtgtgtccgatgaggatctgaacaaattcctgacaaaagccaatgaggaccaaacaagcgtgaaagtgaaagtcgttagcgctcctacccgtactaaaaaagcaatgccgaaatccgttgctcgtgcccctaaaccactggaaaacactgaagcagcacaggcacagccgtctggaagcaaattctctccggccattcctgtttctacccaggagtccgtttctgttccagcaagtgtgagcaccagcattagcagtattagcaccggtgccaccgctagcgccctggttaaaggcaataccaatccgattacaagcatgtctgccccggttcaagcatcagctccagcactgacaaaatcccaaaccgatcgtctggaggttctgctgaatccgaaagacgaaatcagcctgaattccggcaaaccgtttcgtgaactggagagcgaactgctgtcacgtcgtaaaaaagacctgcaacaaatctatgccgaagaacgtgagaactatctggggaaactggaacgtgaaatcacccgctttttcgtggatcgtggctttctggagatcaaatccccgattctgattcctctggagtatatcgagcgtatgggcatcgacaatgataccgaactgagcaaacaaattttccgtgtggataaaaacttctgtctgcgccctatgctagcaccaaatctggctaactatctgcgcaaactggaccgtgccctgcctgatcctatcaaaatcttcgagatcggcccgtgttatcgtaaagagtccgacggtaaagaacatctggaggagtttaccatgctggcctttgcccaaatgggttcaggttgtactcgtgagaacctggaaagcatcatcaccgattttctgaaccacctgggcattgacttcaaaattgtgggcgacagctgtatggtgtttggcgacaccctggatgtcatgcacggcgacctggaactgtctagtgccgttgtgggcccaatcccgctggatcgtgagtggggtatcgacaaaccttggatcggtgcgggttttggtctggagcgtctgctgaaagtaaaacacgacttcaagaacatcaaacgtgctgcacgttccgagtcctattacaatggtatttctactaacctgtaa

SEQ ID NO: 364 - protein, 1410 aa, Artificial Sequence
  Description of Artificial Sequence: Synthetic polypeptide
  CG1::FUS::PylRS(AAAF)
MAICQFFLQGRCRFGDRCWNEHPGARGAGGGRQQPQQQPSGNNRRGWNTTSQRYSNVIQPSSFSKSTPWGGSRDQEKPYFSSFDSGASTNRKEGFGLSENPFASLSPDEQKDEKKLLEGIVKDMEVWESSGQWMFSVYSPVKKKPNISGFTDISPEELRLEYHNFLTSNNLQSYLNSVQRLINQWRNRVNELKSLNISTKVALLSDVKDGVNQAAPAFGFGSSQAATFMSPGFPVNNSSSDNAQNFSFKTNSGFAAASSGSPAGFGSSPAFGAAASTSSGISTSAPAFGFGKPEVTSAASFSFKSPAASSFGSPGFSGLPASLATGPVRAPVAPAFGGGSSVAGFGSPGSHSHTAFSKPSSDTFGNSSISTSLSASSSIIATDNVLFTPRDKLTVEELEQFQSKKFTLGKIPLKPPPLELLNVGAPGSAGSAAGSGMASNDYTQQATQSYGAYPTQPGQGYSQQSSQPYGQQSYSGYSQSTDTSGYGQSSYSSYGQSQNTGYGTQSTPQGYGSTGGYGSSQSSQSSYGQQSSYPGYGQQPAPSSTSGSYGSSSQSSSYGQPQSGSYSQQPSYGGQQQSYGQQQSYNPPQGYGQQNQYNSSSGGGGGGGGGGNYGQDQSSMSSGGGSGGGYGNQDQSGGGGSGGYGQQDRGGRGRGGSGGGGGGGGGGYNRSSGGYEPRGRGGGRGGRGGMGGSDRGGFNKFGGPRDQGSRHDSEQDNSDNNTIFVQGLGENVTIESVADYFKQIGIIKTNKKTGQPMINLYTDRETGKLKGEATVSFDDPPSAKAAIDWFDGKEFSGNPIKVSFATRRADFNRGGGNGRGGRGRGGPMGRGGYGGGGSGGGGRGGFPSGGGGGGGQQRAGDWKCPNPTCENMNFSWRNECNQCKAPKPDGPGGGPGGSHMGGNYGDDRRGGRGGAIAGADYKDDDDKGAPGSAGSAAGSGACPVPLQLPPLERLTLDDKKPLNTLISATGLWMSRTGTIHKIKHHEVSRSKIYIEMACGDHLVVNNSRSSRTARALRHHKYRKTCKRCRVSDEDLNKFLTKANEDQTSVKVKVVSAPTRTKKAMPKSVARAPKPLENTEAAQAQPSGSKFSPAIPVSTQESVSVPASVSTSISSISTGATASALVKGNTNPITSMSAPVQASAPALTKSQTDRLEVLLNPKDEISLNSGKPFRELESELLSRRKKDLQQIYAEERENYLGKLEREITRFFVDRGFLEIKSPILIPLEYIERMGIDNDTELSKQIFRVDKNFCLRPMLAPNLANYLRKLDRALPDPIKIFEIGPCYRKESDGKEHLEEFTMLAFAQMGSGCTRENLESIITDFLNHLGIDFKIVGDSCMVFGDTLDVMHGDLELSSAVVGPIPLDREWGIDKPWIGAGFGLERLLKVKHDFKNIKRAARSESYYNGISTNL

SEQ ID NO: 365 - DNA, 1695 bp, Artificial Sequence
  Description of Artificial Sequence: Synthetic polynucleotide
  CG1::MCP
atggccatttgtcaattcttccttcaaggccggtgccgctttggagatcggtgctggaacgaacatcccggtgctaggggtgcaggaggaggacggcagcaaccgcagcagcagccttcaggtaataatagacgtggatggaatacaactagccagagatattccaatgtcatccagccatccagtttctccaaatccacaccatgggggggcagcagagatcaagaaaagccatatttcagttcttttgattctggagcttcaactaacaggaaggaaggctttggattgtctgagaacccatttgcttcacttagtcctgatgagcagaaagatgaaaagaaacttctggaaggaattgtaaaagatatggaggtttgggaatcatcagggcagtggatgttttctgtttattcaccagtgaaaaagaaacctaatatttcaggttttacagacatttcaccagaggaattgaggcttgaataccataacttcttaaccagcaataacttacagagttatctaaattctgtccaacgtttaataaatcaatggaggaacagggtaaatgaactgaaaagtctaaatatatcaactaaagtagctttgctctctgatgtaaaggatggagtaaatcaagcagcacctgcatttggatttggcagcagtcaagcagcaacatttatgtcgccaggctttccagtcaataacagcagcagtgataatgctcagaactttagttttaaaacaaactctggatttgctgctgcctcttctggaagccctgctggttttgggagttccccagcatttggagctgcagcctctaccagttcaggtatctctacttctgctccagcttttggatttgggaagcctgaagtcacatcggctgcatcattttcattcaaaagccctgcagcttccagttttggatcacctggattttcaggacttccagcttccttggcaacaggtcctgtcagagctccagtggccccagcctttggaggtggcagttctgtggctggttttggtagtccgggctcacattctcacactgctttttctaagccatccagtgacacttttggaaatagcagcatatccacttctctgtcagcctcaagcagcatcattgcaacagataatgtgttattcacacccagagataaactaacagtagaagaactggaacaatttcaatccaagaaatttactctgggaaaaattccattaaagcctccacctctggaacttctaaatgttgcgatcgcatatccctatgatgtgccggattatgctggagcaccaggaagtgctggttctgctgctggtagtggagcttctaactttactcagttcgttctcgtcgacaatggcggaactggcgacgtgactgtcgccccaagcaacttcgctaacgggatcgctgaatggatcagctctaactcgcgttcacaggcttacaaagtaacctgtagcgttcgtcagagctctgcgcagaatcgcaaatacaccatcaaagtcgaggtgcctaaaggcgcctggcgttcgtacttaaatatggaactaaccattccaattttcgccacgaattccgactgcgagcttattgttaaggcaatgcaaggtctcctaaaagatggaaacccgattccctcagcaatcgcagcaaactccggcatctactaa

SEQ ID NO: 366 - protein, 564 aa, Artificial Sequence
  Description of Artificial Sequence: Synthetic polypeptide
  CG1::MCP
MAICQFFLQGRCRFGDRCWNEHPGARGAGGGRQQPQQQPSGNNRRGWNTTSQRYSNVIQPSSFSKSTPWGGSRDQEKPYFSSFDSGASTNRKEGFGLSENPFASLSPDEQKDEKKLLEGIVKDMEVWESSGQWMFSVYSPVKKKPNISGFTDISPEELRLEYHNFLTSNNLQSYLNSVQRLINQWRNRVNELKSLNISTKVALLSDVKDGVNQAAPAFGFGSSQAATFMSPGFPVNNSSSDNAQNFSFKTNSGFAAASSGSPAGFGSSPAFGAAASTSSGISTSAPAFGFGKPEVTSAASFSFKSPAASSFGSPGFSGLPASLATGPVRAPVAPAFGGGSSVAGFGSPGSHSHTAFSKPSSDTFGNSSISTSLSASSSIIATDNVLFTPRDKLTVEELEQFQSKKFTLGKIPLKPPPLELLNVAIAYPYDVPDYAGAPGSAGSAAGSGASNFTQFVLVDNGGTGDVTVAPSNFANGIAEWISSNSRSQAYKVTCSVRQSSAQNRKYTIKVEVPKGAWRSYLNMELTIPIFATNSDCELIVKAMQGLLKDGNPIPSAIAANSGIY

SEQ ID NO: 367 - DNA, 3579 bp, Artificial Sequence
  Description of Artificial Sequence: Synthetic polynucleotide
  CG1::EWSR1::MCP
atggccatttgtcaattcttccttcaaggccggtgccgctttggagatcggtgctggaacgaacatcccggtgctaggggtgcaggaggaggacggcagcaaccgcagcagcagccttcaggtaataatagacgtggatggaatacaactagccagagatattccaatgtcatccagccatccagtttctccaaatccacaccatgggggggcagcagagatcaagaaaagccatatttcagttcttttgattctggagcttcaactaacaggaaggaaggctttggattgtctgagaacccatttgcttcacttagtcctgatgagcagaaagatgaaaagaaacttctggaaggaattgtaaaagatatggaggtttgggaatcatcagggcagtggatgttttctgtttattcaccagtgaaaaagaaacctaatatttcaggttttacagacatttcaccagaggaattgaggcttgaataccataacttcttaaccagcaataacttacagagttatctaaattctgtccaacgtttaataaatcaatggaggaacagggtaaatgaactgaaaagtctaaatatatcaactaaagtagctttgctctctgatgtaaaggatggagtaaatcaagcagcacctgcatttggatttggcagcagtcaagcagcaacatttatgtcgccaggctttccagtcaataacagcagcagtgataatgctcagaactttagttttaaaacaaactctggatttgctgctgcctcttctggaagccctgctggttttgggagttccccagcatttggagctgcagcctctaccagttcaggtatctctacttctgctccagcttttggatttgggaagcctgaagtcacatcggctgcatcattttcattcaaaagccctgcagcttccagttttggatcacctggattttcaggacttccagcttccttggcaacaggtcctgtcagagctccagtggccccagcctttggaggtggcagttctgtggctggttttggtagtccgggctcacattctcacactgctttttctaagccatccagtgacacttttggaaatagcagcatatccacttctctgtcagcctcaagcagcatcattgcaacagataatgtgttattcacacccagagataaactaacagtagaagaactggaacaatttcaatccaagaaatttactctgggaaaaattccattaaagcctccacctctggaacttctaaatgttatggcgtccacggattacagtacctatagccaagctgcagcgcagcagggctacagtgcttacaccgcccagcccactcaaggatatgcacagaccacccaggcatatgggcaacaaagctatggaacctatggacagcccactgatgtcagctatacccaggctcagaccactgcaacctatgggcagaccgcctatgcaacttcttatggacagcctcccactggttatactactccaactgccccccaggcatacagccagcctgtccaggggtatggcactggtgcttatgataccaccactgctacagtcaccaccacccaggcctcctatgcagctcagtctgcatatggcactcagcctgcttatccagcctatgggcagcagccagcagccactgcacctacaagaccgcaggatggaaacaagcccactgagactagtcaacctcaatctagcacagggggttacaaccagcccagcctaggatatggacagagtaactacagttatccccaggtacctgggagctaccccatgcagccagtcactgcacctccatcctaccctcctaccagctattcctctacacagccgactagttatgatcagagcagttactctcagcagaacacctatgggcaaccgagcagctatggacagcagagtagctatggtcaacaaagcagctatgggcagcagcctcccactagttacccaccccaaactggatcctacagccaagctccaagtcaatatagccaacagagcagcagctacgggcagcagagttcattccgacaggaccaccccagtagcatgggtgtttatgggcaggagtctggaggattttccggaccaggagagaaccggagcatgagtggccctgataaccggggcaggggaagagggggatttgatcgtggaggcatgagcagaggtgggcggggaggaggacgcggtggaatgggcagcgctggagagcgaggtggcttcaataagcctggtggacccatggatgaaggaccagatcttgatctaggcccacctgtagatccagatgaagactctgacaacagtgcaatttatgtacaaggattaaatgacagtgtgactctagatgatctggcagacttctttaagcagtgtggggttgttaagatgaacaagagaactgggcaacccatgatccacatctacctggacaaggaaacaggaaagcccaaaggcgatgccacagtgtcctatgaagacccacctactgccaaggctgccgtggaatggtttgatgggaaagattttcaagggagcaaacttaaagtctcccttgctcggaagaagcctccaatgaacagtatgcggggtggtctgccaccccgtgagggcagaggcatgccaccaccactccgtggaggtccaggaggcccaggaggtcctgggggacccatgggtcgcatgggaggccgtggaggagatagaggaggcttccctccaagaggaccccggggttcccgagggaacccctctggaggaggaaacgtccagcaccgagctggagactggcagtgtcccaatccgggttgtggaaaccagaacttcgcctggagaacagagtgcaaccagtgtaaggccccaaagcctgaaggcttcctcccgccaccctttccgcccccgggtggtgatcgtggcagaggtggccctggtggcatgcggggaggaagaggtggcctcatggatcgtggtggtcccggtggaatgttcagaggtggccgtggtggagacagaggtggcttccgtggtggccggggcatggaccgaggtggctttggtggaggaagacgaggtggccctggggggccccctggacctttgatggaacaggcgatcgcatatccctatgatgtgccggattatgctggagcaccaggaagtgctggttctgctgctggtagtggagcttctaactttactcagttcgttctcgtcgacaatggcggaactggcgacgtgactgtcgccccaagcaacttcgctaacgggatcgctgaatggatcagctctaactcgcgttcacaggcttacaaagtaacctgtagcgttcgtcagagctctgcgcagaatcgcaaatacaccatcaaagtcgaggtgcctaaaggcgcctggcgttcgtacttaaatatggaactaaccattccaattttcgccacgaattccgactgcgagcttattgttaaggcaatgcaaggtctcctaaaagatggaaacccgattccctcagcaatcgcagcaaactccggcatctactaa

SEQ ID NO: 368 - protein, 1192 aa, Artificial Sequence
  Description of Artificial Sequence: Synthetic polypeptide
  CG1::EWSR1::MCP
MAICQFFLQGRCRFGDRCWNEHPGARGAGGGRQQPQQQPSGNNRRGWNTTSQRYSNVIQPSSFSKSTPWGGSRDQEKPYFSSFDSGASTNRKEGFGLSENPFASLSPDEQKDEKKLLEGIVKDMEVWESSGQWMFSVYSPVKKKPNISGFTDISPEELRLEYHNFLTSNNLQSYLNSVQRLINQWRNRVNELKSLNISTKVALLSDVKDGVNQAAPAFGFGSSQAATFMSPGFPVNNSSSDNAQNFSFKTNSGFAAASSGSPAGFGSSPAFGAAASTSSGISTSAPAFGFGKPEVTSAASFSFKSPAASSFGSPGFSGLPASLATGPVRAPVAPAFGGGSSVAGFGSPGSHSHTAFSKPSSDTFGNSSISTSLSASSSIIATDNVLFTPRDKLTVEELEQFQSKKFTLGKIPLKPPPLELLNVMASTDYSTYSQAAAQQGYSAYTAQPTQGYAQTTQAYGQQSYGTYGQPTDVSYTQAQTTATYGQTAYATSYGQPPTGYTTPTAPQAYSQPVQGYGTGAYDTTTATVTTTQASYAAQSAYGTQPAYPAYGQQPAATAPTRPQDGNKPTETSQPQSSTGGYNQPSLGYGQSNYSYPQVPGSYPMQPVTAPPSYPPTSYSSTQPTSYDQSSYSQQNTYGQPSSYGQQSSYGQQSSYGQQPPTSYPPQTGSYSQAPSQYSQQSSSYGQQSSFRQDHPSSMGVYGQESGGFSGPGENRSMSGPDNRGRGRGGFDRGGMSRGGRGGGRGGMGSAGERGGFNKPGGPMDEGPDLDLGPPVDPDEDSDNSAIYVQGLNDSVTLDDLADFFKQCGVVKMNKRTGQPMIHIYLDKETGKPKGDATVSYEDPPTAKAAVEWFDGKDFQGSKLKVSLARKKPPMNSMRGGLPPREGRGMPPPLRGGPGGPGGPGGPMGRMGGRGGDRGGFPPRGPRGSRGNPSGGGNVQHRAGDWQCPNPGCGNQNFAWRTECNQCKAPKPEGFLPPPFPPPGGDRGRGGPGGMRGGRGGLMDRGGPGGMFRGGRGGDRGGFRGGRGMDRGGFGGGRRGGPGGPPGPLMEQAIAYPYDVPDYAGAPGSAGSAAGSGASNFTQFVLVDNGGTGDVTVAPSNFANGIAEWISSNSRSQAYKVTCSVRQSSAQNRKYTIKVEVPKGAWRSYLNMELTIPIFATNSDCELIVKAMQGLLKDGNPIPSAIAANSGIY

SEQ ID NO: 369 - DNA, 4233 bp, Artificial Sequence
  Description of Artificial Sequence: Synthetic polynucleotide
  CG1::FUS::PylRS(AF)
atggccatttgtcaattcttccttcaaggccggtgccgctttggagatcggtgctggaacgaacatcccggtgctaggggtgcaggaggaggacggcagcaaccgcagcagcagccttcaggtaataatagacgtggatggaatacaactagccagagatattccaatgtcatccagccatccagtttctccaaatccacaccatgggggggcagcagagatcaagaaaagccatatttcagttcttttgattctggagcttcaactaacaggaaggaaggctttggattgtctgagaacccatttgcttcacttagtcctgatgagcagaaagatgaaaagaaacttctggaaggaattgtaaaagatatggaggtttgggaatcatcagggcagtggatgttttctgtttattcaccagtgaaaaagaaacctaatatttcaggttttacagacatttcaccagaggaattgaggcttgaataccataacttcttaaccagcaataacttacagagttatctaaattctgtccaacgtttaataaatcaatggaggaacagggtaaatgaactgaaaagtctaaatatatcaactaaagtagctttgctctctgatgtaaaggatggagtaaatcaagcagcacctgcatttggatttggcagcagtcaagcagcaacatttatgtcgccaggctttccagtcaataacagcagcagtgataatgctcagaactttagttttaaaacaaactctggatttgctgctgcctcttctggaagccctgctggttttgggagttccccagcatttggagctgcagcctctaccagttcaggtatctctacttctgctccagcttttggatttgggaagcctgaagtcacatcggctgcatcattttcattcaaaagccctgcagcttccagttttggatcacctggattttcaggacttccagcttccttggcaacaggtcctgtcagagctccagtggccccagcctttggaggtggcagttctgtggctggttttggtagtccgggctcacattctcacactgctttttctaagccatccagtgacacttttggaaatagcagcatatccacttctctgtcagcctcaagcagcatcattgcaacagataatgtgttattcacacccagagataaactaacagtagaagaactggaacaatttcaatccaagaaatttactctgggaaaaattccattaaagcctccacctctggaacttctaaatgttggagcacccggctccgccggctccgccgccggctccggcatggcctcaaacgattatacccaacaagcaacccaaagctatggggcctaccccacccagcccgggcagggctattcccagcagagcagtcagccctacggacagcagagttacagtggttatagccagtccacggacacttcaggatatggccagagcagctattcttcttatggccagagccagaacacaggctatggaactcagtcaactccccagggatatggctcgactggcggctatggcagtagccagagctcccaatcgtcttacgggcagcagtcctcctaccctggctatggccagcagccagctcccagcagcacctcgggaagttacggtagcagttctcagagcagcagctatgggcagccccagagtgggagctacagccagcagcctagctatggtggacagcagcaaagctatggacagcagcaaagctataatccccctcagggctatggacagcagaaccagtacaacagcagcagtggtggtggaggtggaggtggaggtggaggtaactatggccaagatcaatcctccatgagtagtggtggtggcagtggtggcggttatggcaatcaagaccagagtggtggaggtggcagcggtggctatggacagcaggaccgtggaggccgcggcaggggtggcagtggtggcggcggcggcggcggcggtggtggttacaaccgcagcagtggtggctatgaacccagaggtcgtggaggtggccgtggaggcagaggtggcatgggcggaagtgaccgtggtggcttcaataaatttggtggccctcgggaccaaggatcacgtcatgactccgaacaggataattcagacaacaacaccatctttgtgcaaggcctgggtgagaatgttacaattgagtctgtggctgattacttcaagcagattggtattattaagacaaacaagaaaacgggacagcccatgattaatttgtacacagacagggaaactggcaagctgaagggagaggcaacggtctcttttgatgacccaccttcagctaaagcagctattgactggtttgatggtaaagaattctccggaaatcctatcaaggtctcatttgctactcgccgggcagactttaatcggggtggtggcaatggtcgtggaggccgagggcgaggaggacccatgggccgtggaggctatggaggtggtggcagtggtggtggtggccgaggaggatttcccagtggaggtggtggcggtggaggacagcagcgagctggtgactggaagtgtcctaatcccacctgtgagaatatgaacttctcttggaggaatgaatgcaaccagtgtaaggcccctaaaccagatggcccaggagggggaccaggtggctctcacatggggggtaactacggggatgatcgtcgtggtggcagaggtggtgcgatcgcaggcgccgattacaaggacgatgatgacaagggagcaccaggaagtgctggttctgctgctggtagtggagcgtgcccggtgccgctgcagctgccgccgctggaacgcctgaccctggatgataaaaaaccgctgaataccctgatctctgctactggtctgtggatgagtcgtaccggaaccattcataaaatcaaacaccacgaggttagccgttcgaaaatctatattgagatggcgtgtggcgatcatctggttgtgaacaatagccgctcttctcgtacagcacgtgcactgcgtcaccacaaatatcgtaaaacctgtaaacgttgccgtgtgtccgatgaggatctgaacaaattcctgacaaaagccaatgaggaccaaacaagcgtgaaagtgaaagtcgttagcgctcctacccgtactaaaaaagcaatgccgaaatccgttgctcgtgcccctaaaccactggaaaacactgaagcagcacaggcacagccgtctggaagcaaattctctccggccattcctgtttctacccaggagtccgtttctgttccagcaagtgtgagcaccagcattagcagtattagcaccggtgccaccgctagcgccctggttaaaggcaataccaatccgattacaagcatgtctgccccggttcaagcatcagctccagcactgacaaaatcccaaaccgatcgtctggaggttctgctgaatccgaaagacgaaatcagcctgaattccggcaaaccgtttcgtgaactggagagcgaactgctgtcacgtcgtaaaaaagacctgcaacaaatctatgccgaagaacgtgagaactatctggggaaactggaacgtgaaatcacccgctttttcgtggatcgtggctttctggagatcaaatccccgattctgattcctctggagtatatcgagcgtatgggcatcgacaatgataccgaactgagcaaacaaattttccgtgtggataaaaacttctgtctgcgccctatgctagcaccaaatctggctaactatctgcgcaaactggaccgtgccctgcctgatcctatcaaaatcttcgagatcggcccgtgttatcgtaaagagtccgacggtaaagaacatctggaggagtttaccatgctgaacttttgccaaatgggttcaggttgtactcgtgagaacctggaaagcatcatcaccgattttctgaaccacctgggcattgacttcaaaattgtgggcgacagctgtatggtgtttggcgacaccctggatgtcatgcacggcgacctggaactgtctagtgccgttgtgggcccaatcccgctggatcgtgagtggggtatcgacaaaccttggatcggtgcgggttttggtctggagcgtctgctgaaagtaaaacacgacttcaagaacatcaaacgtgctgcacgttccgagtcctattacaatggtatttctactaacctgtaa

SEQ ID NO: 370 - protein, 1410 aa, Artificial Sequence
  Description of Artificial Sequence: Synthetic polypeptide
  CG1::FUS::PylRS(AF)
MAICQFFLQGRCRFGDRCWNEHPGARGAGGGRQQPQQQPSGNNRRGWNTTSQRYSNVIQPSSFSKSTPWGGSRDQEKPYFSSFDSGASTNRKEGFGLSENPFASLSPDEQKDEKKLLEGIVKDMEVWESSGQWMFSVYSPVKKKPNISGFTDISPEELRLEYHNFLTSNNLQSYLNSVQRLINQWRNRVNELKSLNISTKVALLSDVKDGVNQAAPAFGFGSSQAATFMSPGFPVNNSSSDNAQNFSFKTNSGFAAASSGSPAGFGSSPAFGAAASTSSGISTSAPAFGFGKPEVTSAASFSFKSPAASSFGSPGFSGLPASLATGPVRAPVAPAFGGGSSVAGFGSPGSHSHTAFSKPSSDTFGNSSISTSLSASSSIIATDNVLFTPRDKLTVEELEQFQSKKFTLGKIPLKPPPLELLNVGAPGSAGSAAGSGMASNDYTQQATQSYGAYPTQPGQGYSQQSSQPYGQQSYSGYSQSTDTSGYGQSSYSSYGQSQNTGYGTQSTPQGYGSTGGYGSSQSSQSSYGQQSSYPGYGQQPAPSSTSGSYGSSSQSSSYGQPQSGSYSQQPSYGGQQQSYGQQQSYNPPQGYGQQNQYNSSSGGGGGGGGGGNYGQDQSSMSSGGGSGGGYGNQDQSGGGGSGGYGQQDRGGRGRGGSGGGGGGGGGGYNRSSGGYEPRGRGGGRGGRGGMGGSDRGGFNKFGGPRDQGSRHDSEQDNSDNNTIFVQGLGENVTIESVADYFKQIGIIKTNKKTGQPMINLYTDRETGKLKGEATVSFDDPPSAKAAIDWFDGKEFSGNPIKVSFATRRADFNRGGGNGRGGRGRGGPMGRGGYGGGGSGGGGRGGFPSGGGGGGGQQRAGDWKCPNPTCENMNFSWRNECNQCKAPKPDGPGGGPGGSHMGGNYGDDRRGGRGGAIAGADYKDDDDKGAPGSAGSAAGSGACPVPLQLPPLERLTLDDKKPLNTLISATGLWMSRTGTIHKIKHHEVSRSKIYIEMACGDHLVVNNSRSSRTARALRHHKYRKTCKRCRVSDEDLNKFLTKANEDQTSVKVKVVSAPTRTKKAMPKSVARAPKPLENTEAAQAQPSGSKFSPAIPVSTQESVSVPASVSTSISSISTGATASALVKGNTNPITSMSAPVQASAPALTKSQTDRLEVLLNPKDEISLNSGKPFRELESELLSRRKKDLQQIYAEERENYLGKLEREITRFFVDRGFLEIKSPILIPLEYIERMGIDNDTELSKQIFRVDKNFCLRPMLAPNLANYLRKLDRALPDPIKIFEIGPCYRKESDGKEHLEEFTMLNFCQMGSGCTRENLESIITDFLNHLGIDFKIVGDSCMVFGDTLDVMHGDLELSSAVVGPIPLDREWGIDKPWIGAGFGLERLLKVKHDFKNIKRAARSESYYNGISTNL

SEQ ID NO: 371 - DNA, 4647 bp, Artificial Sequence
  Description of Artificial Sequence: Synthetic polynucleotide
  CG1::FUS::MCP::PylRS(AF)
atggccatttgtcaattcttccttcaaggccggtgccgctttggagatcggtgctggaacgaacatcccggtgctaggggtgcaggaggaggacggcagcaaccgcagcagcagccttcaggtaataatagacgtggatggaatacaactagccagagatattccaatgtcatccagccatccagtttctccaaatccacaccatgggggggcagcagagatcaagaaaagccatatttcagttcttttgattctggagcttcaactaacaggaaggaaggctttggattgtctgagaacccatttgcttcacttagtcctgatgagcagaaagatgaaaagaaacttctggaaggaattgtaaaagatatggaggtttgggaatcatcagggcagtggatgttttctgtttattcaccagtgaaaaagaaacctaatatttcaggttttacagacatttcaccagaggaattgaggcttgaataccataacttcttaaccagcaataacttacagagttatctaaattctgtccaacgtttaataaatcaatggaggaacagggtaaatgaactgaaaagtctaaatatatcaactaaagtagctttgctctctgatgtaaaggatggagtaaatcaagcagcacctgcatttggatttggcagcagtcaagcagcaacatttatgtcgccaggctttccagtcaataacagcagcagtgataatgctcagaactttagttttaaaacaaactctggatttgctgctgcctcttctggaagccctgctggttttgggagttccccagcatttggagctgcagcctctaccagttcaggtatctctacttctgctccagcttttggatttgggaagcctgaagtcacatcggctgcatcattttcattcaaaagccctgcagcttccagttttggatcacctggattttcaggacttccagcttccttggcaacaggtcctgtcagagctccagtggccccagcctttggaggtggcagttctgtggctggttttggtagtccgggctcacattctcacactgctttttctaagccatccagtgacacttttggaaatagcagcatatccacttctctgtcagcctcaagcagcatcattgcaacagataatgtgttattcacacccagagataaactaacagtagaagaactggaacaatttcaatccaagaaatttactctgggaaaaattccattaaagcctccacctctggaacttctaaatgttggagcacccggctccgccggctccgccgccggctccggcatggcctcaaacgattatacccaacaagcaacccaaagctatggggcctaccccacccagcccgggcagggctattcccagcagagcagtcagccctacggacagcagagttacagtggttatagccagtccacggacacttcaggatatggccagagcagctattcttcttatggccagagccagaacacaggctatggaactcagtcaactccccagggatatggctcgactggcggctatggcagtagccagagctcccaatcgtcttacgggcagcagtcctcctaccctggctatggccagcagccagctcccagcagcacctcgggaagttacggtagcagttctcagagcagcagctatgggcagccccagagtgggagctacagccagcagcctagctatggtggacagcagcaaagctatggacagcagcaaagctataatccccctcagggctatggacagcagaaccagtacaacagcagcagtggtggtggaggtggaggtggaggtggaggtaactatggccaagatcaatcctccatgagtagtggtggtggcagtggtggcggttatggcaatcaagaccagagtggtggaggtggcagcggtggctatggacagcaggaccgtggaggccgcggcaggggtggcagtggtggcggcggcggcggcggcggtggtggttacaaccgcagcagtggtggctatgaacccagaggtcgtggaggtggccgtggaggcagaggtggcatgggcggaagtgaccgtggtggcttcaataaatttggtggccctcgggaccaaggatcacgtcatgactccgaacaggataattcagacaacaacaccatctttgtgcaaggcctgggtgagaatgttacaattgagtctgtggctgattacttcaagcagattggtattattaagacaaacaagaaaacgggacagcccatgattaatttgtacacagacagggaaactggcaagctgaagggagaggcaacggtctcttttgatgacccaccttcagctaaagcagctattgactggtttgatggtaaagaattctccggaaatcctatcaaggtctcatttgctactcgccgggcagactttaatcggggtggtggcaatggtcgtggaggccgagggcgaggaggacccatgggccgtggaggctatggaggtggtggcagtggtggtggtggccgaggaggatttcccagtggaggtggtggcggtggaggacagcagcgagctggtgactggaagtgtcctaatcccacctgtgagaatatgaacttctcttggaggaatgaatgcaaccagtgtaaggcccctaaaccagatggcccaggagggggaccaggtggctctcacatggggggtaactacggggatgatcgtcgtggtggcagaggtggtgcgatcgcatatccctatgatgtgccggattatgctggagcaccaggaagtgctggttctgctgctggtagtggagcttctaactttactcagttcgttctcgtcgacaatggcggaactggcgacgtgactgtcgccccaagcaacttcgctaacgggatcgctgaatggatcagctctaactcgcgttcacaggcttacaaagtaacctgtagcgttcgtcagagctctgcgcagaatcgcaaatacaccatcaaagtcgaggtgcctaaaggcgcctggcgttcgtacttaaatatggaactaaccattccaattttcgccacgaattccgactgcgagcttattgttaaggcaatgcaaggtctcctaaaagatggaaacccgattccctcagcaatcgcagcaaactccggcatctacggcgccgattacaaggacgatgatgacaagggagcaccaggaagtgctggttctgctgctggtagtggagcgtgcccggtgccgctgcagctgccgccgctggaacgcctgaccctggatgataaaaaaccgctgaataccctgatctctgctactggtctgtggatgagtcgtaccggaaccattcataaaatcaaacaccacgaggttagccgttcgaaaatctatattgagatggcgtgtggcgatcatctggttgtgaacaatagccgctcttctcgtacagcacgtgcactgcgtcaccacaaatatcgtaaaacctgtaaacgttgccgtgtgtccgatgaggatctgaacaaattcctgacaaaagccaatgaggaccaaacaagcgtgaaagtgaaagtcgttagcgctcctacccgtactaaaaaagcaatgccgaaatccgttgctcgtgcccctaaaccactggaaaacactgaagcagcacaggcacagccgtctggaagcaaattctctccggccattcctgtttctacccaggagtccgtttctgttccagcaagtgtgagcaccagcattagcagtattagcaccggtgccaccgctagcgccctggttaaaggcaataccaatccgattacaagcatgtctgccccggttcaagcatcagctccagcactgacaaaatcccaaaccgatcgtctggaggttctgctgaatccgaaagacgaaatcagcctgaattccggcaaaccgtttcgtgaactggagagcgaactgctgtcacgtcgtaaaaaagacctgcaacaaatctatgccgaagaacgtgagaactatctggggaaactggaacgtgaaatcacccgctttttcgtggatcgtggctttctggagatcaaatccccgattctgattcctctggagtatatcgagcgtatgggcatcgacaatgataccgaactgagcaaacaaattttccgtgtggataaaaacttctgtctgcgccctatgctagcaccaaatctggctaactatctgcgcaaactggaccgtgccctgcctgatcctatcaaaatcttcgagatcggcccgtgttatcgtaaagagtccgacggtaaagaacatctggaggagtttaccatgctgaacttttgccaaatgggttcaggttgtactcgtgagaacctggaaagcatcatcaccgattttctgaaccacctgggcattgacttcaaaattgtgggcgacagctgtatggtgtttggcgacaccctggatgtcatgcacggcgacctggaactgtctagtgccgttgtgggcccaatcccgctggatcgtgagtggggtatcgacaaaccttggatcggtgcgggttttggtctggagcgtctgctgaaagtaaaacacgacttcaagaacatcaaacgtgctgcacgttccgagtcctattacaatggtatttctactaacctgtaa

SEQ ID NO: 372 - protein, 1548 aa, Artificial Sequence
  Description of Artificial Sequence: Synthetic polypeptide
  CG1::FUS::MCP::PylRS(AF)
MAICQFFLQGRCRFGDRCWNEHPGARGAGGGRQQPQQQPSGNNRRGWNTTSQRYSNVIQPSSFSKSTPWGGSRDQEKPYFSSFDSGASTNRKEGFGLSENPFASLSPDEQKDEKKLLEGIVKDMEVWESSGQWMFSVYSPVKKKPNISGFTDISPEELRLEYHNFLTSNNLQSYLNSVQRLINQWRNRVNELKSLNISTKVALLSDVKDGVNQAAPAFGFGSSQAATFMSPGFPVNNSSSDNAQNFSFKTNSGFAAASSGSPAGFGSSPAFGAAASTSSGISTSAPAFGFGKPEVTSAASFSFKSPAASSFGSPGFSGLPASLATGPVRAPVAPAFGGGSSVAGFGSPGSHSHTAFSKPSSDTFGNSSISTSLSASSSIIATDNVLFTPRDKLTVEELEQFQSKKFTLGKIPLKPPPLELLNVGAPGSAGSAAGSGMASNDYTQQATQSYGAYPTQPGQGYSQQSSQPYGQQSYSGYSQSTDTSGYGQSSYSSYGQSQNTGYGTQSTPQGYGSTGGYGSSQSSQSSYGQQSSYPGYGQQPAPSSTSGSYGSSSQSSSYGQPQSGSYSQQPSYGGQQQSYGQQQSYNPPQGYGQQNQYNSSSGGGGGGGGGGNYGQDQSSMSSGGGSGGGYGNQDQSGGGGSGGYGQQDRGGRGRGGSGGGGGGGGGGYNRSSGGYEPRGRGGGRGGRGGMGGSDRGGFNKFGGPRDQGSRHDSEQDNSDNNTIFVQGLGENVTIESVADYFKQIGIIKTNKKTGQPMINLYTDRETGKLKGEATVSFDDPPSAKAAIDWFDGKEFSGNPIKVSFATRRADFNRGGGNGRGGRGRGGPMGRGGYGGGGSGGGGRGGFPSGGGGGGGQQRAGDWKCPNPTCENMNFSWRNECNQCKAPKPDGPGGGPGGSHMGGNYGDDRRGGRGGAIAYPYDVPDYAGAPGSAGSAAGSGASNFTQFVLVDNGGTGDVTVAPSNFANGIAEWISSNSRSQAYKVTCSVRQSSAQNRKYTIKVEVPKGAWRSYLNMELTIPIFATNSDCELIVKAMQGLLKDGNPIPSAIAANSGIYGADYKDDDDKGAPGSAGSAAGSGACPVPLQLPPLERLTLDDKKPLNTLISATGLWMSRTGTIHKIKHHEVSRSKIYIEMACGDHLVVNNSRSSRTARALRHHKYRKTCKRCRVSDEDLNKFLTKANEDQTSVKVKVVSAPTRTKKAMPKSVARAPKPLENTEAAQAQPSGSKFSPAIPVSTQESVSVPASVSTSISSISTGATASALVKGNTNPITSMSAPVQASAPALTKSQTDRLEVLLNPKDEISLNSGKPFRELESELLSRRKKDLQQIYAEERENYLGKLEREITRFFVDRGFLEIKSPILIPLEYIERMGIDNDTELSKQIFRVDKNFCLRPMLAPNLANYLRKLDRALPDPIKIFEIGPCYRKESDGKEHLEEFTMLNFCQMGSGCTRENLESIITDFLNHLGIDFKIVGDSCMVFGDTLDVMHGDLELSSAVVGPIPLDREWGIDKPWIGAGFGLERLLKVKHDFKNIKRAARSESYYNGISTNL

SEQ ID NO: 373 - DNA, 2493 bp, Artificial Sequence
  Description of Artificial Sequence: Synthetic polynucleotide
  CMP-SaTr::PylRS(AF)
atggctgccccgagagacaatgtcactttattattcaagttatactgcttggcagtgatgaccctgatggctgcagtctataccatagctttaagatacacaaggacatcagacaaagaactctacttttcaaccacagccgtgtgtatcacagaagttataaagttattgctaagtgtgggaattttagctaaagaaactggtagtctgggtagattcaaagcatctttaagagaaaatgtcttggggagccccaaggaactgttgaagttaagtgtgccatcgttagtgtatgctgttcagaacaacatggctttcctagctcttagcaatctggatgcagcagtgtaccaggtgacctaccagttgaagattccgtgtactgctttatgcactgttttaatgttaaaccggacactcagcaaattacagtgggtttcagtttttatgctgtgtgctggagttacgcttgtacagtggaaaccagcccaagctacaaaagtggtggtggaacaaaatccattattagggtttggcgctatagctattgctgtattgtgctcaggatttgcaggagtatattttgaaaaagttttaaagagttcagatacttctctttgggtgagaaacattcaaatgtatctatcagggattattgtgacattagctggcgtctacttgtcagatggagctgaaattaaagaaaaaggatttttctatggttacacatattatgtctggtttgtcatctttcttgcaagtgttggtggcctctacacttctgttgtggttaagtacacagacaatatcatgaaaggcttttctgcagcagcggccattgtcctttccaccattgcttcagtaatgctgtttggattacagataacacttacctttgccctgggtactcttcttgtatgtgtttccatatatctctatggattacccagacaagacactacatccatccaacaaggagaaacagcttcaaaggagagagttattggtgtgggcgccgattacaaggacgatgatgacaagggagcaccaggaagtgctggttctgctgctggtagtggagcgtgcccggtgccgctgcagctgccgccgctggaacgcctgaccctggatgataaaaaaccgctgaataccctgatctctgctactggtctgtggatgagtcgtaccggaaccattcataaaatcaaacaccacgaggttagccgttcgaaaatctatattgagatggcgtgtggcgatcatctggttgtgaacaatagccgctcttctcgtacagcacgtgcactgcgtcaccacaaatatcgtaaaacctgtaaacgttgccgtgtgtccgatgaggatctgaacaaattcctgacaaaagccaatgaggaccaaacaagcgtgaaagtgaaagtcgttagcgctcctacccgtactaaaaaagcaatgccgaaatccgttgctcgtgcccctaaaccactggaaaacactgaagcagcacaggcacagccgtctggaagcaaattctctccggccattcctgtttctacccaggagtccgtttctgttccagcaagtgtgagcaccagcattagcagtattagcaccggtgccaccgctagcgccctggttaaaggcaataccaatccgattacaagcatgtctgccccggttcaagcatcagctccagcactgacaaaatcccaaaccgatcgtctggaggttctgctgaatccgaaagacgaaatcagcctgaattccggcaaaccgtttcgtgaactggagagcgaactgctgtcacgtcgtaaaaaagacctgcaacaaatctatgccgaagaacgtgagaactatctggggaaactggaacgtgaaatcacccgctttttcgtggatcgtggctttctggagatcaaatccccgattctgattcctctggagtatatcgagcgtatgggcatcgacaatgataccgaactgagcaaacaaattttccgtgtggataaaaacttctgtctgcgccctatgctagcaccaaatctggctaactatctgcgcaaactggaccgtgccctgcctgatcctatcaaaatcttcgagatcggcccgtgttatcgtaaagagtccgacggtaaagaacatctggaggagtttaccatgctgaacttttgccaaatgggttcaggttgtactcgtgagaacctggaaagcatcatcaccgattttctgaaccacctgggcattgacttcaaaattgtgggcgacagctgtatggtgtttggcgacaccctggatgtcatgcacggcgacctggaactgtctagtgccgttgtgggcccaatcccgctggatcgtgagtggggtatcgacaaaccttggatcggtgcgggttttggtctggagcgtctgctgaaagtaaaacacgacttcaagaacatcaaacgtgctgcacgttccgagtcctattacaatggtatttctactaacctgtaa

SEQ ID NO: 374 - protein, 830 aa, Artificial Sequence
  Description of Artificial Sequence: Synthetic polypeptide
  CMP-SaTr::PylRS(AF)
MAAPRDNVTLLFKLYCLAVMTLMAAVYTIALRYTRTSDKELYFSTTAVCITEVIKLLLSVGILAKETGSLGRFKASLRENVLGSPKELLKLSVPSLVYAVQNNMAFLALSNLDAAVYQVTYQLKIPCTALCTVLMLNRTLSKLQWVSVFMLCAGVTLVQWKPAQATKVVVEQNPLLGFGAIAIAVLCSGFAGVYFEKVLKSSDTSLWVRNIQMYLSGIIVTLAGVYLSDGAEIKEKGFFYGYTYYVWFVIFLASVGGLYTSVVVKYTDNIMKGFSAAAAIVLSTIASVMLFGLQITLTFALGTLLVCVSIYLYGLPRQDTTSIQQGETASKERVIGVGADYKDDDDKGAPGSAGSAAGSGACPVPLQLPPLERLTLDDKKPLNTLISATGLWMSRTGTIHKIKHHEVSRSKIYIEMACGDHLVVNNSRSSRTARALRHHKYRKTCKRCRVSDEDLNKFLTKANEDQTSVKVKVVSAPTRTKKAMPKSVARAPKPLENTEAAQAQPSGSKFSPAIPVSTQESVSVPASVSTSISSISTGATASALVKGNTNPITSMSAPVQASAPALTKSQTDRLEVLLNPKDEISLNSGKPFRELESELLSRRKKDLQQIYAEERENYLGKLEREITRFFVDRGFLEIKSPILIPLEYIERMGIDNDTELSKQIFRVDKNFCLRPMLAPNLANYLRKLDRALPDPIKIFEIGPCYRKESDGKEHLEEFTMLNFCQMGSGCTRENLESIITDFLNHLGIDFKIVGDSCMVFGDTLDVMHGDLELSSAVVGPIPLDREWGIDKPWIGAGFGLERLLKVKHDFKNIKRAARSESYYNGISTNL

SEQ ID NO: 375 - DNA, 2493 bp, Artificial Sequence
  Description of Artificial Sequence: Synthetic polynucleotide
  CMP-SaTr::PylRS(AA)
atggctgccccgagagacaatgtcactttattattcaagttatactgcttggcagtgatgaccctgatggctgcagtctataccatagctttaagatacacaaggacatcagacaaagaactctacttttcaaccacagccgtgtgtatcacagaagttataaagttattgctaagtgtgggaattttagctaaagaaactggtagtctgggtagattcaaagcatctttaagagaaaatgtcttggggagccccaaggaactgttgaagttaagtgtgccatcgttagtgtatgctgttcagaacaacatggctttcctagctcttagcaatctggatgcagcagtgtaccaggtgacctaccagttgaagattccgtgtactgctttatgcactgttttaatgttaaaccggacactcagcaaattacagtgggtttcagtttttatgctgtgtgctggagttacgcttgtacagtggaaaccagcccaagctacaaaagtggtggtggaacaaaatccattattagggtttggcgctatagctattgctgtattgtgctcaggatttgcaggagtatattttgaaaaagttttaaagagttcagatacttctctttgggtgagaaacattcaaatgtatctatcagggattattgtgacattagctggcgtctacttgtcagatggagctgaaattaaagaaaaaggatttttctatggttacacatattatgtctggtttgtcatctttcttgcaagtgttggtggcctctacacttctgttgtggttaagtacacagacaatatcatgaaaggcttttctgcagcagcggccattgtcctttccaccattgcttcagtaatgctgtttggattacagataacacttacctttgccctgggtactcttcttgtatgtgtttccatatatctctatggattacccagacaagacactacatccatccaacaaggagaaacagcttcaaaggagagagttattggtgtgggcgccgattacaaggacgatgatgacaagggagcaccaggaagtgctggttctgctgctggtagtggagcgtgcccggtgccgctgcagctgccgccgctggaacgcctgaccctggatgacaaaaaaccgctgaataccctgatctctgctactggtctgtggatgagtcgtaccggaaccattcataaaatcaaacaccacgaggttagccgttcgaaaatctatattgagatggcgtgtggcgatcatctggttgtgaacaatagccgctcttctcgtacagcacgtgcactgcgtcaccacaaatatcgtaaaacctgtaaacgttgccgtgtgtccgatgaggatctgaacaaattcctgacaaaagccaatgaggaccaaacaagcgtgaaagtgaaagtcgttagcgctcctacccgtactaaaaaagcaatgccgaaatccgttgctcgtgcccctaaaccactggaaaacactgaagcagcacaggcacagccgtctggaagcaaattctctccggccattcctgtttctacccaggagtccgtttctgttccagcaagtgtgagcaccagcattagcagtattagcaccggtgccaccgctagcgccctggttaaaggcaataccaatccgattacaagcatgtctgccccggttcaagcatcagctccagcactgacaaaatcccaaaccgatcgtctggaggttctgctgaatccgaaagacgaaatcagcctgaattccggcaaaccgtttcgtgaactggagagcgaactgctgtcacgtcgtaaaaaagacctgcaacaaatctatgccgaagaacgtgagaactatctggggaaactggaacgtgaaatcacccgctttttcgtggatcgtggctttctggagatcaaatccccgattctgattcctctggagtatatcgagcgtatgggcatcgacaatgataccgaactgagcaaacaaattttccgtgtggataaaaacttctgtctgcgccctatgctggcaccaaatctgtataactatctgcgcaaactggaccgtgccctgcctgatcctatcaaaatcttcgagatcggcccgtgttatcgtaaagagtccgacggtaaagaacatctggaggagtttaccatgctggcctttgcccaaatgggttcaggttgtactcgtgagaacctggaaagcatcatcaccgattttctgaaccacctgggcattgacttcaaaattgtgggcgacagctgtatggtgtatggcgacaccctggatgtcatgcacggcgacctggaactgtctagtgccgttgttggaccaattccgctggaccgtgagtggggtatcgacaaaccgtggatcggagcaggattcggtctggaacgcctgctgaaagtgaaacacgacttcaaaaacatcaaacgtgccgcccgttctgaatcgtattataacgggatctctacgaacctgtaa

SEQ ID NO: 376 - protein, 830 aa, Artificial Sequence
  Description of Artificial Sequence: Synthetic polypeptide
  CMP-SaTr::PylRS(AA)
MAAPRDNVTLLFKLYCLAVMTLMAAVYTIALRYTRTSDKELYFSTTAVCITEVIKLLLSVGILAKETGSLGRFKASLRENVLGSPKELLKLSVPSLVYAVQNNMAFLALSNLDAAVYQVTYQLKIPCTALCTVLMLNRTLSKLQWVSVFMLCAGVTLVQWKPAQATKVVVEQNPLLGFGAIAIAVLCSGFAGVYFEKVLKSSDTSLWVRNIQMYLSGIIVTLAGVYLSDGAEIKEKGFFYGYTYYVWFVIFLASVGGLYTSVVVKYTDNIMKGFSAAAAIVLSTIASVMLFGLQITLTFALGTLLVCVSIYLYGLPRQDTTSIQQGETASKERVIGVGADYKDDDDKGAPGSAGSAAGSGACPVPLQLPPLERLTLDDKKPLNTLISATGLWMSRTGTIHKIKHHEVSRSKIYIEMACGDHLVVNNSRSSRTARALRHHKYRKTCKRCRVSDEDLNKFLTKANEDQTSVKVKVVSAPTRTKKAMPKSVARAPKPLENTEAAQAQPSGSKFSPAIPVSTQESVSVPASVSTSISSISTGATASALVKGNTNPITSMSAPVQASAPALTKSQTDRLEVLLNPKDEISLNSGKPFRELESELLSRRKKDLQQIYAEERENYLGKLEREITRFFVDRGFLEIKSPILIPLEYIERMGIDNDTELSKQIFRVDKNFCLRPMLAPNLYNYLRKLDRALPDPIKIFEIGPCYRKESDGKEHLEEFTMLAFAQMGSGCTRENLESIITDFLNHLGIDFKIVGDSCMVYGDTLDVMHGDLELSSAVVGPIPLDREWGIDKPWIGAGFGLERLLKVKHDFKNIKRAARSESYYNGISTNL

SEQ ID NO: 377 - DNA, 2493 bp, Artificial Sequence
  Description of Artificial Sequence: Synthetic polynucleotide
  CMP-SaTr::PylRS(AAAF)
atggctgccccgagagacaatgtcactttattattcaagttatactgcttggcagtgatgaccctgatggctgcagtctataccatagctttaagatacacaaggacatcagacaaagaactctacttttcaaccacagccgtgtgtatcacagaagttataaagttattgctaagtgtgggaattttagctaaagaaactggtagtctgggtagattcaaagcatctttaagagaaaatgtcttggggagccccaaggaactgttgaagttaagtgtgccatcgttagtgtatgctgttcagaacaacatggctttcctagctcttagcaatctggatgcagcagtgtaccaggtgacctaccagttgaagattccgtgtactgctttatgcactgttttaatgttaaaccggacactcagcaaattacagtgggtttcagtttttatgctgtgtgctggagttacgcttgtacagtggaaaccagcccaagctacaaaagtggtggtggaacaaaatccattattagggtttggcgctatagctattgctgtattgtgctcaggatttgcaggagtatattttgaaaaagttttaaagagttcagatacttctctttgggtgagaaacattcaaatgtatctatcagggattattgtgacattagctggcgtctacttgtcagatggagctgaaattaaagaaaaaggatttttctatggttacacatattatgtctggtttgtcatctttcttgcaagtgttggtggcctctacacttctgttgtggttaagtacacagacaatatcatgaaaggcttttctgcagcagcggccattgtcctttccaccattgcttcagtaatgctgtttggattacagataacacttacctttgccctgggtactcttcttgtatgtgtttccatatatctctatggattacccagacaagacactacatccatccaacaaggagaaacagcttcaaaggagagagttattggtgtgggcgccgattacaaggacgatgatgacaagggagcaccaggaagtgctggttctgctgctggtagtggagcgtgcccggtgccgctgcagctgccgccgctggaacgcctgaccctggatgataaaaaaccgctgaataccctgatctctgctactggtctgtggatgagtcgtaccggaaccattcataaaatcaaacaccacgaggttagccgttcgaaaatctatattgagatggcgtgtggcgatcatctggttgtgaacaatagccgctcttctcgtacagcacgtgcactgcgtcaccacaaatatcgtaaaacctgtaaacgttgccgtgtgtccgatgaggatctgaacaaattcctgacaaaagccaatgaggaccaaacaagcgtgaaagtgaaagtcgttagcgctcctacccgtactaaaaaagcaatgccgaaatccgttgctcgtgcccctaaaccactggaaaacactgaagcagcacaggcacagccgtctggaagcaaattctctccggccattcctgtttctacccaggagtccgtttctgttccagcaagtgtgagcaccagcattagcagtattagcaccggtgccaccgctagcgccctggttaaaggcaataccaatccgattacaagcatgtctgccccggttcaagcatcagctccagcactgacaaaatcccaaaccgatcgtctggaggttctgctgaatccgaaagacgaaatcagcctgaattccggcaaaccgtttcgtgaactggagagcgaactgctgtcacgtcgtaaaaaagacctgcaacaaatctatgccgaagaacgtgagaactatctggggaaactggaacgtgaaatcacccgctttttcgtggatcgtggctttctggagatcaaatccccgattctgattcctctggagtatatcgagcgtatgggcatcgacaatgataccgaactgagcaaacaaattttccgtgtggataaaaacttctgtctgcgccctatgctagcaccaaatctggctaactatctgcgcaaactggaccgtgccctgcctgatcctatcaaaatcttcgagatcggcccgtgttatcgtaaagagtccgacggtaaagaacatctggaggagtttaccatgctggcctttgcccaaatgggttcaggttgtactcgtgagaacctggaaagcatcatcaccgattttctgaaccacctgggcattgacttcaaaattgtgggcgacagctgtatggtgtttggcgacaccctggatgtcatgcacggcgacctggaactgtctagtgccgttgtgggcccaatcccgctggatcgtgagtggggtatcgacaaaccttggatcggtgcgggttttggtctggagcgtctgctgaaagtaaaacacgacttcaagaacatcaaacgtgctgcacgttccgagtcctattacaatggtatttctactaacctgtaa

SEQ ID NO: 378 - protein, 830 aa, Artificial Sequence
  Description of Artificial Sequence: Synthetic polypeptide
  CMP-SaTr::PylRS(AAAF)
MAAPRDNVTLLFKLYCLAVMTLMAAVYTIALRYTRTSDKELYFSTTAVCITEVIKLLLSVGILAKETGSLGRFKASLRENVLGSPKELLKLSVPSLVYAVQNNMAFLALSNLDAAVYQVTYQLKIPCTALCTVLMLNRTLSKLQWVSVFMLCAGVTLVQWKPAQATKVVVEQNPLLGFGAIAIAVLCSGFAGVYFEKVLKSSDTSLWVRNIQMYLSGIIVTLAGVYLSDGAEIKEKGFFYGYTYYVWFVIFLASVGGLYTSVVVKYTDNIMKGFSAAAAIVLSTIASVMLFGLQITLTFALGTLLVCVSIYLYGLPRQDTTSIQQGETASKERVIGVGADYKDDDDKGAPGSAGSAAGSGACPVPLQLPPLERLTLDDKKPLNTLISATGLWMSRTGTIHKIKHHEVSRSKIYIEMACGDHLVVNNSRSSRTARALRHHKYRKTCKRCRVSDEDLNKFLTKANEDQTSVKVKVVSAPTRTKKAMPKSVARAPKPLENTEAAQAQPSGSKFSPAIPVSTQESVSVPASVSTSISSISTGATASALVKGNTNPITSMSAPVQASAPALTKSQTDRLEVLLNPKDEISLNSGKPFRELESELLSRRKKDLQQIYAEERENYLGKLEREITRFFVDRGFLEIKSPILIPLEYIERMGIDNDTELSKQIFRVDKNFCLRPMLAPNLANYLRKLDRALPDPIKIFEIGPCYRKESDGKEHLEEFTMLAFAQMGSGCTRENLESIITDFLNHLGIDFKIVGDSCMVFGDTLDVMHGDLELSSAVVGPIPLDREWGIDKPWIGAGFGLERLLKVKHDFKNIKRAARSESYYNGISTNL

SEQ ID NO: 379 - DNA, 3975 bp, Artificial Sequence
  Description of Artificial Sequence: Synthetic polynucleotide
  CMP-SaTr::FUS::PylRS(AA)
atggctgccccgagagacaatgtcactttattattcaagttatactgcttggcagtgatgaccctgatggctgcagtctataccatagctttaagatacacaaggacatcagacaaagaactctacttttcaaccacagccgtgtgtatcacagaagttataaagttattgctaagtgtgggaattttagctaaagaaactggtagtctgggtagattcaaagcatctttaagagaaaatgtcttggggagccccaaggaactgttgaagttaagtgtgccatcgttagtgtatgctgttcagaacaacatggctttcctagctcttagcaatctggatgcagcagtgtaccaggtgacctaccagttgaagattccgtgtactgctttatgcactgttttaatgttaaaccggacactcagcaaattacagtgggtttcagtttttatgctgtgtgctggagttacgcttgtacagtggaaaccagcccaagctacaaaagtggtggtggaacaaaatccattattagggtttggcgctatagctattgctgtattgtgctcaggatttgcaggagtatattttgaaaaagttttaaagagttcagatacttctctttgggtgagaaacattcaaatgtatctatcagggattattgtgacattagctggcgtctacttgtcagatggagctgaaattaaagaaaaaggatttttctatggttacacatattatgtctggtttgtcatctttcttgcaagtgttggtggcctctacacttctgttgtggttaagtacacagacaatatcatgaaaggcttttctgcagcagcggccattgtcctttccaccattgcttcagtaatgctgtttggattacagataacacttacctttgccctgggtactcttcttgtatgtgtttccatatatctctatggattacccagacaagacactacatccatccaacaaggagaaacagcttcaaaggagagagttattggtgtgggagcacccggctccgccggctccgccgccggctccggcatggcctcaaacgattatacccaacaagcaacccaaagctatggggcctaccccacccagcccgggcagggctattcccagcagagcagtcagccctacggacagcagagttacagtggttatagccagtccacggacacttcaggatatggccagagcagctattcttcttatggccagagccagaacacaggctatggaactcagtcaactccccagggatatggctcgactggcggctatggcagtagccagagctcccaatcgtcttacgggcagcagtcctcctaccctggctatggccagcagccagctcccagcagcacctcgggaagttacggtagcagttctcagagcagcagctatgggcagccccagagtgggagctacagccagcagcctagctatggtggacagcagcaaagctatggacagcagcaaagctataatccccctcagggctatggacagcagaaccagtacaacagcagcagtggtggtggaggtggaggtggaggtggaggtaactatggccaagatcaatcctccatgagtagtggtggtggcagtggtggcggttatggcaatcaagaccagagtggtggaggtggcagcggtggctatggacagcaggaccgtggaggccgcggcaggggtggcagtggtggcggcggcggcggcggcggtggtggttacaaccgcagcagtggtggctatgaacccagaggtcgtggaggtggccgtggaggcagaggtggcatgggcggaagtgaccgtggtggcttcaataaatttggtggccctcgggaccaaggatcacgtcatgactccgaacaggataattcagacaacaacaccatctttgtgcaaggcctgggtgagaatgttacaattgagtctgtggctgattacttcaagcagattggtattattaagacaaacaagaaaacgggacagcccatgattaatttgtacacagacagggaaactggcaagctgaagggagaggcaacggtctcttttgatgacccaccttcagctaaagcagctattgactggtttgatggtaaagaattctccggaaatcctatcaaggtctcatttgctactcgccgggcagactttaatcggggtggtggcaatggtcgtggaggccgagggcgaggaggacccatgggccgtggaggctatggaggtggtggcagtggtggtggtggccgaggaggatttcccagtggaggtggtggcggtggaggacagcagcgagctggtgactggaagtgtcctaatcccacctgtgagaatatgaacttctcttggaggaatgaatgcaaccagtgtaaggcccctaaaccagatggcccaggagggggaccaggtggctctcacatggggggtaactacggggatgatcgtcgtggtggcagaggtggtgcgatcgcaggcgccgattacaaggacgatgatgacaagggagcaccaggaagtgctggttctgctgctggtagtggagcgtgcccggtgccgctgcagctgccgccgctggaacgcctgaccctggatgacaaaaaaccgctgaataccctgatctctgctactggtctgtggatgagtcgtaccggaaccattcataaaatcaaacaccacgaggttagccgttcgaaaatctatattgagatggcgtgtggcgatcatctggttgtgaacaatagccgctcttctcgtacagcacgtgcactgcgtcaccacaaatatcgtaaaacctgtaaacgttgccgtgtgtccgatgaggatctgaacaaattcctgacaaaagccaatgaggaccaaacaagcgtgaaagtgaaagtcgttagcgctcctacccgtactaaaaaagcaatgccgaaatccgttgctcgtgcccctaaaccactggaaaacactgaagcagcacaggcacagccgtctggaagcaaattctctccggccattcctgtttctacccaggagtccgtttctgttccagcaagtgtgagcaccagcattagcagtattagcaccggtgccaccgctagcgccctggttaaaggcaataccaatccgattacaagcatgtctgccccggttcaagcatcagctccagcactgacaaaatcccaaaccgatcgtctggaggttctgctgaatccgaaagacgaaatcagcctgaattccggcaaaccgtttcgtgaactggagagcgaactgctgtcacgtcgtaaaaaagacctgcaacaaatctatgccgaagaacgtgagaactatctggggaaactggaacgtgaaatcacccgctttttcgtggatcgtggctttctggagatcaaatccccgattctgattcctctggagtatatcgagcgtatgggcatcgacaatgataccgaactgagcaaacaaattttccgtgtggataaaaacttctgtctgcgccctatgctggcaccaaatctgtataactatctgcgcaaactggaccgtgccctgcctgatcctatcaaaatcttcgagatcggcccgtgttatcgtaaagagtccgacggtaaagaacatctggaggagtttaccatgctggcctttgcccaaatgggttcaggttgtactcgtgagaacctggaaagcatcatcaccgattttctgaaccacctgggcattgacttcaaaattgtgggcgacagctgtatggtgtatggcgacaccctggatgtcatgcacggcgacctggaactgtctagtgccgttgttggaccaattccgctggaccgtgagtggggtatcgacaaaccgtggatcggagcaggattcggtctggaacgcctgctgaaagtgaaacacgacttcaaaaacatcaaacgtgccgcccgttctgaatcgtattataacgggatctctacgaacctgtaa

SEQ ID NO: 380 - protein, 1324 aa, Artificial Sequence
  Description of Artificial Sequence: Synthetic polypeptide
  CMP-SaTr::FUS::PylRS(AA)
MAAPRDNVTLLFKLYCLAVMTLMAAVYTIALRYTRTSDKELYFSTTAVCITEVIKLLLSVGILAKETGSLGRFKASLRENVLGSPKELLKLSVPSLVYAVQNNMAFLALSNLDAAVYQVTYQLKIPCTALCTVLMLNRTLSKLQWVSVFMLCAGVTLVQWKPAQATKVVVEQNPLLGFGAIAIAVLCSGFAGVYFEKVLKSSDTSLWVRNIQMYLSGIIVTLAGVYLSDGAEIKEKGFFYGYTYYVWFVIFLASVGGLYTSVVVKYTDNIMKGFSAAAAIVLSTIASVMLFGLQITLTFALGTLLVCVSIYLYGLPRQDTTSIQQGETASKERVIGVGAPGSAGSAAGSGMASNDYTQQATQSYGAYPTQPGQGYSQQSSQPYGQQSYSGYSQSTDTSGYGQSSYSSYGQSQNTGYGTQSTPQGYGSTGGYGSSQSSQSSYGQQSSYPGYGQQPAPSSTSGSYGSSSQSSSYGQPQSGSYSQQPSYGGQQQSYGQQQSYNPPQGYGQQNQYNSSSGGGGGGGGGGNYGQDQSSMSSGGGSGGGYGNQDQSGGGGSGGYGQQDRGGRGRGGSGGGGGGGGGGYNRSSGGYEPRGRGGGRGGRGGMGGSDRGGFNKFGGPRDQGSRHDSEQDNSDNNTIFVQGLGENVTIESVADYFKQIGIIKTNKKTGQPMINLYTDRETGKLKGEATVSFDDPPSAKAAIDWFDGKEFSGNPIKVSFATRRADFNRGGGNGRGGRGRGGPMGRGGYGGGGSGGGGRGGFPSGGGGGGGQQRAGDWKCPNPTCENMNFSWRNECNQCKAPKPDGPGGGPGGSHMGGNYGDDRRGGRGGAIAGADYKDDDDKGAPGSAGSAAGSGACPVPLQLPPLERLTLDDKKPLNTLISATGLWMSRTGTIHKIKHHEVSRSKIYIEMACGDHLVVNNSRSSRTARALRHHKYRKTCKRCRVSDEDLNKFLTKANEDQTSVKVKVVSAPTRTKKAMPKSVARAPKPLENTEAAQAQPSGSKFSPAIPVSTQESVSVPASVSTSISSISTGATASALVKGNTNPITSMSAPVQASAPALTKSQTDRLEVLLNPKDEISLNSGKPFRELESELLSRRKKDLQQIYAEERENYLGKLEREITRFFVDRGFLEIKSPILIPLEYIERMGIDNDTELSKQIFRVDKNFCLRPMLAPNLYNYLRKLDRALPDPIKIFEIGPCYRKESDGKEHLEEFTMLAFAQMGSGCTRENLESIITDFLNHLGIDFKIVGDSCMVYGDTLDVMHGDLELSSAVVGPIPLDREWGIDKPWIGAGFGLERLLKVKHDFKNIKRAARSESYYNGISTNL

SEQ ID NO: 381 - DNA, 3975 bp, Artificial Sequence
  Description of Artificial Sequence: Synthetic polynucleotide
  CMP-SaTr::FUS::PylRS(AAAF)
atggctgccccgagagacaatgtcactttattattcaagttatactgcttggcagtgatgaccctgatggctgcagtctataccatagctttaagatacacaaggacatcagacaaagaactctacttttcaaccacagccgtgtgtatcacagaagttataaagttattgctaagtgtgggaattttagctaaagaaactggtagtctgggtagattcaaagcatctttaagagaaaatgtcttggggagccccaaggaactgttgaagttaagtgtgccatcgttagtgtatgctgttcagaacaacatggctttcctagctcttagcaatctggatgcagcagtgtaccaggtgacctaccagttgaagattccgtgtactgctttatgcactgttttaatgttaaaccggacactcagcaaattacagtgggtttcagtttttatgctgtgtgctggagttacgcttgtacagtggaaaccagcccaagctacaaaagtggtggtggaacaaaatccattattagggtttggcgctatagctattgctgtattgtgctcaggatttgcaggagtatattttgaaaaagttttaaagagttcagatacttctctttgggtgagaaacattcaaatgtatctatcagggattattgtgacattagctggcgtctacttgtcagatggagctgaaattaaagaaaaaggatttttctatggttacacatattatgtctggtttgtcatctttcttgcaagtgttggtggcctctacacttctgttgtggttaagtacacagacaatatcatgaaaggcttttctgcagcagcggccattgtcctttccaccattgcttcagtaatgctgtttggattacagataacacttacctttgccctgggtactcttcttgtatgtgtttccatatatctctatggattacccagacaagacactacatccatccaacaaggagaaacagcttcaaaggagagagttattggtgtgggagcacccggctccgccggctccgccgccggctccggcatggcctcaaacgattatacccaacaagcaacccaaagctatggggcctaccccacccagcccgggcagggctattcccagcagagcagtcagccctacggacagcagagttacagtggttatagccagtccacggacacttcaggatatggccagagcagctattcttcttatggccagagccagaacacaggctatggaactcagtcaactccccagggatatggctcgactggcggctatggcagtagccagagctcccaatcgtcttacgggcagcagtcctcctaccctggctatggccagcagccagctcccagcagcacctcgggaagttacggtagcagttctcagagcagcagctatgggcagccccagagtgggagctacagccagcagcctagctatggtggacagcagcaaagctatggacagcagcaaagctataatccccctcagggctatggacagcagaaccagtacaacagcagcagtggtggtggaggtggaggtggaggtggaggtaactatggccaagatcaatcctccatgagtagtggtggtggcagtggtggcggttatggcaatcaagaccagagtggtggaggtggcagcggtggctatggacagcaggaccgtggaggccgcggcaggggtggcagtggtggcggcggcggcggcggcggtggtggttacaaccgcagcagtggtggctatgaacccagaggtcgtggaggtggccgtggaggcagaggtggcatgggcggaagtgaccgtggtggcttcaataaatttggtggccctcgggaccaaggatcacgtcatgactccgaacaggataattcagacaacaacaccatctttgtgcaaggcctgggtgagaatgttacaattgagtctgtggctgattacttcaagcagattggtattattaagacaaacaagaaaacgggacagcccatgattaatttgtacacagacagggaaactggcaagctgaagggagaggcaacggtctcttttgatgacccaccttcagctaaagcagctattgactggtttgatggtaaagaattctccggaaatcctatcaaggtctcatttgctactcgccgggcagactttaatcggggtggtggcaatggtcgtggaggccgagggcgaggaggacccatgggccgtggaggctatggaggtggtggcagtggtggtggtggccgaggaggatttcccagtggaggtggtggcggtggaggacagcagcgagctggtgactggaagtgtcctaatcccacctgtgagaatatgaacttctcttggaggaatgaatgcaaccagtgtaaggcccctaaaccagatggcccaggagggggaccaggtggctctcacatggggggtaactacggggatgatcgtcgtggtggcagaggtggtgcgatcgcaggcgccgattacaaggacgatgatgacaagggagcaccaggaagtgctggttctgctgctggtagtggagcgtgcccggtgccgctgcagctgccgccgctggaacgcctgaccctggatgataaaaaaccgctgaataccctgatctctgctactggtctgtggatgagtcgtaccggaaccattcataaaatcaaacaccacgaggttagccgttcgaaaatctatattgagatggcgtgtggcgatcatctggttgtgaacaatagccgctcttctcgtacagcacgtgcactgcgtcaccacaaatatcgtaaaacctgtaaacgttgccgtgtgtccgatgaggatctgaacaaattcctgacaaaagccaatgaggaccaaacaagcgtgaaagtgaaagtcgttagcgctcctacccgtactaaaaaagcaatgccgaaatccgttgctcgtgcccctaaaccactggaaaacactgaagcagcacaggcacagccgtctggaagcaaattctctccggccattcctgtttctacccaggagtccgtttctgttccagcaagtgtgagcaccagcattagcagtattagcaccggtgccaccgctagcgccctggttaaaggcaataccaatccgattacaagcatgtctgccccggttcaagcatcagctccagcactgacaaaatcccaaaccgatcgtctggaggttctgctgaatccgaaagacgaaatcagcctgaattccggcaaaccgtttcgtgaactggagagcgaactgctgtcacgtcgtaaaaaagacctgcaacaaatctatgccgaagaacgtgagaactatctggggaaactggaacgtgaaatcacccgctttttcgtggatcgtggctttctggagatcaaatccccgattctgattcctctggagtatatcgagcgtatgggcatcgacaatgataccgaactgagcaaacaaattttccgtgtggataaaaacttctgtctgcgccctatgctagcaccaaatctggctaactatctgcgcaaactggaccgtgccctgcctgatcctatcaaaatcttcgagatcggcccgtgttatcgtaaagagtccgacggtaaagaacatctggaggagtttaccatgctggcctttgcccaaatgggttcaggttgtactcgtgagaacctggaaagcatcatcaccgattttctgaaccacctgggcattgacttcaaaattgtgggcgacagctgtatggtgtttggcgacaccctggatgtcatgcacggcgacctggaactgtctagtgccgttgtgggcccaatcccgctggatcgtgagtggggtatcgacaaaccttggatcggtgcgggttttggtctggagcgtctgctgaaagtaaaacacgacttcaagaacatcaaacgtgctgcacgttccgagtcctattacaatggtatttctactaacctgtaa

SEQ ID NO: 382 - protein, 1324 aa, Artificial Sequence
  Description of Artificial Sequence: Synthetic polypeptide
  CMP-SaTr::FUS::PylRS(AAAF)
MAAPRDNVTLLFKLYCLAVMTLMAAVYTIALRYTRTSDKELYFSTTAVCITEVIKLLLSVGILAKETGSLGRFKASLRENVLGSPKELLKLSVPSLVYAVQNNMAFLALSNLDAAVYQVTYQLKIPCTALCTVLMLNRTLSKLQWVSVFMLCAGVTLVQWKPAQATKVVVEQNPLLGFGAIAIAVLCSGFAGVYFEKVLKSSDTSLWVRNIQMYLSGIIVTLAGVYLSDGAEIKEKGFFYGYTYYVWFVIFLASVGGLYTSVVVKYTDNIMKGFSAAAAIVLSTIASVMLFGLQITLTFALGTLLVCVSIYLYGLPRQDTTSIQQGETASKERVIGVGAPGSAGSAAGSGMASNDYTQQATQSYGAYPTQPGQGYSQQSSQPYGQQSYSGYSQSTDTSGYGQSSYSSYGQSQNTGYGTQSTPQGYGSTGGYGSSQSSQSSYGQQSSYPGYGQQPAPSSTSGSYGSSSQSSSYGQPQSGSYSQQPSYGGQQQSYGQQQSYNPPQGYGQQNQYNSSSGGGGGGGGGGNYGQDQSSMSSGGGSGGGYGNQDQSGGGGSGGYGQQDRGGRGRGGSGGGGGGGGGGYNRSSGGYEPRGRGGGRGGRGGMGGSDRGGFNKFGGPRDQGSRHDSEQDNSDNNTIFVQGLGENVTIESVADYFKQIGIIKTNKKTGQPMINLYTDRETGKLKGEATVSFDDPPSAKAAIDWFDGKEFSGNPIKVSFATRRADFNRGGGNGRGGRGRGGPMGRGGYGGGGSGGGGRGGFPSGGGGGGGQQRAGDWKCPNPTCENMNFSWRNECNQCKAPKPDGPGGGPGGSHMGGNYGDDRRGGRGGAIAGADYKDDDDKGAPGSAGSAAGSGACPVPLQLPPLERLTLDDKKPLNTLISATGLWMSRTGTIHKIKHHEVSRSKIYIEMACGDHLVVNNSRSSRTARALRHHKYRKTCKRCRVSDEDLNKFLTKANEDQTSVKVKVVSAPTRTKKAMPKSVARAPKPLENTEAAQAQPSGSKFSPAIPVSTQESVSVPASVSTSISSISTGATASALVKGNTNPITSMSAPVQASAPALTKSQTDRLEVLLNPKDEISLNSGKPFRELESELLSRRKKDLQQIYAEERENYLGKLEREITRFFVDRGFLEIKSPILIPLEYIERMGIDNDTELSKQIFRVDKNFCLRPMLAPNLANYLRKLDRALPDPIKIFEIGPCYRKESDGKEHLEEFTMLAFAQMGSGCTRENLESIITDFLNHLGIDFKIVGDSCMVFGDTLDVMHGDLELSSAVVGPIPLDREWGIDKPWIGAGFGLERLLKVKHDFKNIKRAARSESYYNGISTNL

SEQ ID NO: 383 - DNA, 1437 bp, Artificial Sequence
  Description of Artificial Sequence: Synthetic polynucleotide
  CMP-SaTr::MCP
atggctgccccgagagacaatgtcactttattattcaagttatactgcttggcagtgatgaccctgatggctgcagtctataccatagctttaagatacacaaggacatcagacaaagaactctacttttcaaccacagccgtgtgtatcacagaagttataaagttattgctaagtgtgggaattttagctaaagaaactggtagtctgggtagattcaaagcatctttaagagaaaatgtcttggggagccccaaggaactgttgaagttaagtgtgccatcgttagtgtatgctgttcagaacaacatggctttcctagctcttagcaatctggatgcagcagtgtaccaggtgacctaccagttgaagattccgtgtactgctttatgcactgttttaatgttaaaccggacactcagcaaattacagtgggtttcagtttttatgctgtgtgctggagttacgcttgtacagtggaaaccagcccaagctacaaaagtggtggtggaacaaaatccattattagggtttggcgctatagctattgctgtattgtgctcaggatttgcaggagtatattttgaaaaagttttaaagagttcagatacttctctttgggtgagaaacattcaaatgtatctatcagggattattgtgacattagctggcgtctacttgtcagatggagctgaaattaaagaaaaaggatttttctatggttacacatattatgtctggtttgtcatctttcttgcaagtgttggtggcctctacacttctgttgtggttaagtacacagacaatatcatgaaaggcttttctgcagcagcggccattgtcctttccaccattgcttcagtaatgctgtttggattacagataacacttacctttgccctgggtactcttcttgtatgtgtttccatatatctctatggattacccagacaagacactacatccatccaacaaggagaaacagcttcaaaggagagagttattggtgtggcgatcgcatatccctatgatgtgccggattatgctggagcaccaggaagtgctggttctgctgctggtagtggagcttctaactttactcagttcgttctcgtcgacaatggcggaactggcgacgtgactgtcgccccaagcaacttcgctaacgggatcgctgaatggatcagctctaactcgcgttcacaggcttacaaagtaacctgtagcgttcgtcagagctctgcgcagaatcgcaaatacaccatcaaagtcgaggtgcctaaaggcgcctggcgttcgtacttaaatatggaactaaccattccaattttcgccacgaattccgactgcgagcttattgttaaggcaatgcaaggtctcctaaaagatggaaacccgattccctcagcaatcgcagcaaactccggcatctactaa

SEQ ID NO: 384 - protein, 478 aa, Artificial Sequence
  Description of Artificial Sequence: Synthetic polypeptide
  CMP-SaTr::MCP
MAAPRDNVTLLFKLYCLAVMTLMAAVYTIALRYTRTSDKELYFSTTAVCITEVIKLLLSVGILAKETGSLGRFKASLRENVLGSPKELLKLSVPSLVYAVQNNMAFLALSNLDAAVYQVTYQLKIPCTALCTVLMLNRTLSKLQWVSVFMLCAGVTLVQWKPAQATKVVVEQNPLLGFGAIAIAVLCSGFAGVYFEKVLKSSDTSLWVRNIQMYLSGIIVTLAGVYLSDGAEIKEKGFFYGYTYYVWFVIFLASVGGLYTSVVVKYTDNIMKGFSAAAAIVLSTIASVMLFGLQITLTFALGTLLVCVSIYLYGLPRQDTTSIQQGETASKERVIGVAIAYPYDVPDYAGAPGSAGSAAGSGASNFTQFVLVDNGGTGDVTVAPSNFANGIAEWISSNSRSQAYKVTCSVRQSSAQNRKYTIKVEVPKGAWRSYLNMELTIPIFATNSDCELIVKAMQGLLKDGNPIPSAIAANSGIY

SEQ ID NO: 385 - DNA, 3321 bp, Artificial Sequence
  Description of Artificial Sequence: Synthetic polynucleotide
  CMP-SaTr::EWSR1::MCP
atggctgccccgagagacaatgtcactttattattcaagttatactgcttggcagtgatgaccctgatggctgcagtctataccatagctttaagatacacaaggacatcagacaaagaactctacttttcaaccacagccgtgtgtatcacagaagttataaagttattgctaagtgtgggaattttagctaaagaaactggtagtctgggtagattcaaagcatctttaagagaaaatgtcttggggagccccaaggaactgttgaagttaagtgtgccatcgttagtgtatgctgttcagaacaacatggctttcctagctcttagcaatctggatgcagcagtgtaccaggtgacctaccagttgaagattccgtgtactgctttatgcactgttttaatgttaaaccggacactcagcaaattacagtgggtttcagtttttatgctgtgtgctggagttacgcttgtacagtggaaaccagcccaagctacaaaagtggtggtggaacaaaatccattattagggtttggcgctatagctattgctgtattgtgctcaggatttgcaggagtatattttgaaaaagttttaaagagttcagatacttctctttgggtgagaaacattcaaatgtatctatcagggattattgtgacattagctggcgtctacttgtcagatggagctgaaattaaagaaaaaggatttttctatggttacacatattatgtctggtttgtcatctttcttgcaagtgttggtggcctctacacttctgttgtggttaagtacacagacaatatcatgaaaggcttttctgcagcagcggccattgtcctttccaccattgcttcagtaatgctgtttggattacagataacacttacctttgccctgggtactcttcttgtatgtgtttccatatatctctatggattacccagacaagacactacatccatccaacaaggagaaacagcttcaaaggagagagttattggtgtgatggcgtccacggattacagtacctatagccaagctgcagcgcagcagggctacagtgcttacaccgcccagcccactcaaggatatgcacagaccacccaggcatatgggcaacaaagctatggaacctatggacagcccactgatgtcagctatacccaggctcagaccactgcaacctatgggcagaccgcctatgcaacttcttatggacagcctcccactggttatactactccaactgccccccaggcatacagccagcctgtccaggggtatggcactggtgcttatgataccaccactgctacagtcaccaccacccaggcctcctatgcagctcagtctgcatatggcactcagcctgcttatccagcctatgggcagcagccagcagccactgcacctacaagaccgcaggatggaaacaagcccactgagactagtcaacctcaatctagcacagggggttacaaccagcccagcctaggatatggacagagtaactacagttatccccaggtacctgggagctaccccatgcagccagtcactgcacctccatcctaccctcctaccagctattcctctacacagccgactagttatgatcagagcagttactctcagcagaacacctatgggcaaccgagcagctatggacagcagagtagctatggtcaacaaagcagctatgggcagcagcctcccactagttacccaccccaaactggatcctacagccaagctccaagtcaatatagccaacagagcagcagctacgggcagcagagttcattccgacaggaccaccccagtagcatgggtgtttatgggcaggagtctggaggattttccggaccaggagagaaccggagcatgagtggccctgataaccggggcaggggaagagggggatttgatcgtggaggcatgagcagaggtgggcggggaggaggacgcggtggaatgggcagcgctggagagcgaggtggcttcaataagcctggtggacccatggatgaaggaccagatcttgatctaggcccacctgtagatccagatgaagactctgacaacagtgcaatttatgtacaaggattaaatgacagtgtgactctagatgatctggcagacttctttaagcagtgtggggttgttaagatgaacaagagaactgggcaacccatgatccacatctacctggacaaggaaacaggaaagcccaaaggcgatgccacagtgtcctatgaagacccacctactgccaaggctgccgtggaatggtttgatgggaaagattttcaagggagcaaacttaaagtctcccttgctcggaagaagcctccaatgaacagtatgcggggtggtctgccaccccgtgagggcagaggcatgccaccaccactccgtggaggtccaggaggcccaggaggtcctgggggacccatgggtcgcatgggaggccgtggaggagatagaggaggcttccctccaagaggaccccggggttcccgagggaacccctctggaggaggaaacgtccagcaccgagctggagactggcagtgtcccaatccgggttgtggaaaccagaacttcgcctggagaacagagtgcaaccagtgtaaggccccaaagcctgaaggcttcctcccgccaccctttccgcccccgggtggtgatcgtggcagaggtggccctggtggcatgcggggaggaagaggtggcctcatggatcgtggtggtcccggtggaatgttcagaggtggccgtggtggagacagaggtggcttccgtggtggccggggcatggaccgaggtggctttggtggaggaagacgaggtggccctggggggccccctggacctttgatggaacaggcgatcgcatatccctatgatgtgccggattatgctggagcaccaggaagtgctggttctgctgctggtagtggagcttctaactttactcagttcgttctcgtcgacaatggcggaactggcgacgtgactgtcgccccaagcaacttcgctaacgggatcgctgaatggatcagctctaactcgcgttcacaggcttacaaagtaacctgtagcgttcgtcagagctctgcgcagaatcgcaaatacaccatcaaagtcgaggtgcctaaaggcgcctggcgttcgtacttaaatatggaactaaccattccaattttcgccacgaattccgactgcgagcttattgttaaggcaatgcaaggtctcctaaaagatggaaacccgattccctcagcaatcgcagcaaactccggcatctactaa

SEQ ID NO: 386 - protein, 1106 aa, Artificial Sequence
  Description of Artificial Sequence: Synthetic polypeptide
  CMP-SaTr::EWSR1::MCP
MAAPRDNVTLLFKLYCLAVMTLMAAVYTIALRYTRTSDKELYFSTTAVCITEVIKLLLSVGILAKETGSLGRFKASLRENVLGSPKELLKLSVPSLVYAVQNNMAFLALSNLDAAVYQVTYQLKIPCTALCTVLMLNRTLSKLQWVSVFMLCAGVTLVQWKPAQATKVVVEQNPLLGFGAIAIAVLCSGFAGVYFEKVLKSSDTSLWVRNIQMYLSGIIVTLAGVYLSDGAEIKEKGFFYGYTYYVWFVIFLASVGGLYTSVVVKYTDNIMKGFSAAAAIVLSTIASVMLFGLQITLTFALGTLLVCVSIYLYGLPRQDTTSIQQGETASKERVIGVMASTDYSTYSQAAAQQGYSAYTAQPTQGYAQTTQAYGQQSYGTYGQPTDVSYTQAQTTATYGQTAYATSYGQPPTGYTTPTAPQAYSQPVQGYGTGAYDTTTATVTTTQASYAAQSAYGTQPAYPAYGQQPAATAPTRPQDGNKPTETSQPQSSTGGYNQPSLGYGQSNYSYPQVPGSYPMQPVTAPPSYPPTSYSSTQPTSYDQSSYSQQNTYGQPSSYGQQSSYGQQSSYGQQPPTSYPPQTGSYSQAPSQYSQQSSSYGQQSSFRQDHPSSMGVYGQESGGFSGPGENRSMSGPDNRGRGRGGFDRGGMSRGGRGGGRGGMGSAGERGGFNKPGGPMDEGPDLDLGPPVDPDEDSDNSAIYVQGLNDSVTLDDLADFFKQCGVVKMNKRTGQPMIHIYLDKETGKPKGDATVSYEDPPTAKAAVEWFDGKDFQGSKLKVSLARKKPPMNSMRGGLPPREGRGMPPPLRGGPGGPGGPGGPMGRMGGRGGDRGGFPPRGPRGSRGNPSGGGNVQHRAGDWQCPNPGCGNQNFAWRTECNQCKAPKPEGFLPPPFPPPGGDRGRGGPGGMRGGRGGLMDRGGPGGMFRGGRGGDRGGFRGGRGMDRGGFGGGRRGGPGGPPGPLMEQAIAYPYDVPDYAGAPGSAGSAAGSGASNFTQFVLVDNGGTGDVTVAPSNFANGIAEWISSNSRSQAYKVTCSVRQSSAQNRKYTIKVEVPKGAWRSYLNMELTIPIFATNSDCELIVKAMQGLLKDGNPIPSAIAANSGIY

SEQ ID NO: 387 - DNA, 3465 bp, Artificial Sequence
  Description of Artificial Sequence: Synthetic polynucleotide
  CMP-SaTr::PylRS(AF)EWSR1::4xlambdaN22
atggctgccccgagagacaatgtcactttattattcaagttatactgcttggcagtgatgaccctgatggctgcagtctataccatagctttaagatacacaaggacatcagacaaagaactctacttttcaaccacagccgtgtgtatcacagaagttataaagttattgctaagtgtgggaattttagctaaagaaactggtagtctgggtagattcaaagcatctttaagagaaaatgtcttggggagccccaaggaactgttgaagttaagtgtgccatcgttagtgtatgctgttcagaacaacatggctttcctagctcttagcaatctggatgcagcagtgtaccaggtgacctaccagttgaagattccgtgtactgctttatgcactgttttaatgttaaaccggacactcagcaaattacagtgggtttcagtttttatgctgtgtgctggagttacgcttgtacagtggaaaccagcccaagctacaaaagtggtggtggaacaaaatccattattagggtttggcgctatagctattgctgtattgtgctcaggatttgcaggagtatattttgaaaaagttttaaagagttcagatacttctctttgggtgagaaacattcaaatgtatctatcagggattattgtgacattagctggcgtctacttgtcagatggagctgaaattaaagaaaaaggatttttctatggttacacatattatgtctggtttgtcatctttcttgcaagtgttggtggcctctacacttctgttgtggttaagtacacagacaatatcatgaaaggcttttctgcagcagcggccattgtcctttccaccattgcttcagtaatgctgtttggattacagataacacttacctttgccctgggtactcttcttgtatgtgtttccatatatctctatggattacccagacaagacactacatccatccaacaaggagaaacagcttcaaaggagagagttattggtgtgatggcgtccacggattacagtacctatagccaagctgcagcgcagcagggctacagtgcttacaccgcccagcccactcaaggatatgcacagaccacccaggcatatgggcaacaaagctatggaacctatggacagcccactgatgtcagctatacccaggctcagaccactgcaacctatgggcagaccgcctatgcaacttcttatggacagcctcccactggttatactactccaactgccccccaggcatacagccagcctgtccaggggtatggcactggtgcttatgataccaccactgctacagtcaccaccacccaggcctcctatgcagctcagtctgcatatggcactcagcctgcttatccagcctatgggcagcagccagcagccactgcacctacaagaccgcaggatggaaacaagcccactgagactagtcaacctcaatctagcacagggggttacaaccagcccagcctaggatatggacagagtaactacagttatccccaggtacctgggagctaccccatgcagccagtcactgcacctccatcctaccctcctaccagctattcctctacacagccgactagttatgatcagagcagttactctcagcagaacacctatgggcaaccgagcagctatggacagcagagtagctatggtcaacaaagcagctatgggcagcagcctcccactagttacccaccccaaactggatcctacagccaagctccaagtcaatatagccaacagagcagcagctacgggcagcagagttcattccgacaggaccaccccagtagcatgggtgtttatgggcaggagtctggaggattttccggaccaggagagaaccggagcatgagtggccctgataaccggggcaggggaagagggggatttgatcgtggaggcatgagcagaggtgggcggggaggaggacgcggtggaatgggcagcgctggagagcgaggtggcttcaataagcctggtggacccatggatgaaggaccagatcttgatctaggcccacctgtagatccagatgaagactctgacaacagtgcaatttatgtacaaggattaaatgacagtgtgactctagatgatctggcagacttctttaagcagtgtggggttgttaagatgaacaagagaactgggcaacccatgatccacatctacctggacaaggaaacaggaaagcccaaaggcgatgccacagtgtcctatgaagacccacctactgccaaggctgccgtggaatggtttgatgggaaagattttcaagggagcaaacttaaagtctcccttgctcggaagaagcctccaatgaacagtatgcggggtggtctgccaccccgtgagggcagaggcatgccaccaccactccgtggaggtccaggaggcccaggaggtcctgggggacccatgggtcgcatgggaggccgtggaggagatagaggaggcttccctccaagaggaccccggggttcccgagggaacccctctggaggaggaaacgtccagcaccgagctggagactggcagtgtcccaatccgggttgtggaaaccagaacttcgcctggagaacagagtgcaaccagtgtaaggccccaaagcctgaaggcttcctcccgccaccctttccgcccccgggtggtgatcgtggcagaggtggccctggtggcatgcggggaggaagaggtggcctcatggatcgtggtggtcccggtggaatgttcagaggtggccgtggtggagacagaggtggcttccgtggtggccggggcatggaccgaggtggctttggtggaggaagacgaggtggccctggggggccccctggacctttgatggaacaggcgatcgcaggagcaccaggaagtgctggttctgctgctggtagtggagagcagaagctgatctcagaggaggacctgctagccaccatggacgcacaaacacgacgacgtgagcgtcgcgctgagaaacaagctcaatggaaagctgcaaacccaccgctcgacggagccggagctggcgctggagctggagccggagctggcggtctagccaccatggacgcacaaacacgacgacgtgagcgtcgcgctgagaaacaagctcaatggaaagctgcaaacccaccgctcgacggagccggagctggcgctggagctggagccggagctggcggtctagccaccatggacgcacaaacacgacgacgtgagcgtcgcgctgagaaacaagctcaatggaaagctgcaaacccaccgctcgacggagccggagctggcgctggagctggagccggagctggcggtctagccaccatggacgcacaaacacgacgacgtgagcgtcgcgctgagaaacaagctcaatggaaagctgcaaacccaccgctcgagtctagagggcccgtttaa

SEQ ID NO: 388 - protein, 1154 aa, Artificial Sequence
  Description of Artificial Sequence: Synthetic polypeptide
  CMP-SaTr::PylRS(AF)EWSR1::4xlambdaN22
MAAPRDNVTLLFKLYCLAVMTLMAAVYTIALRYTRTSDKELYFSTTAVCITEVIKLLLSVGILAKETGSLGRFKASLRENVLGSPKELLKLSVPSLVYAVQNNMAFLALSNLDAAVYQVTYQLKIPCTALCTVLMLNRTLSKLQWVSVFMLCAGVTLVQWKPAQATKVVVEQNPLLGFGAIAIAVLCSGFAGVYFEKVLKSSDTSLWVRNIQMYLSGIIVTLAGVYLSDGAEIKEKGFFYGYTYYVWFVIFLASVGGLYTSVVVKYTDNIMKGFSAAAAIVLSTIASVMLFGLQITLTFALGTLLVCVSIYLYGLPRQDTTSIQQGETASKERVIGVMASTDYSTYSQAAAQQGYSAYTAQPTQGYAQTTQAYGQQSYGTYGQPTDVSYTQAQTTATYGQTAYATSYGQPPTGYTTPTAPQAYSQPVQGYGTGAYDTTTATVTTTQASYAAQSAYGTQPAYPAYGQQPAATAPTRPQDGNKPTETSQPQSSTGGYNQPSLGYGQSNYSYPQVPGSYPMQPVTAPPSYPPTSYSSTQPTSYDQSSYSQQNTYGQPSSYGQQSSYGQQSSYGQQPPTSYPPQTGSYSQAPSQYSQQSSSYGQQSSFRQDHPSSMGVYGQESGGFSGPGENRSMSGPDNRGRGRGGFDRGGMSRGGRGGGRGGMGSAGERGGFNKPGGPMDEGPDLDLGPPVDPDEDSDNSAIYVQGLNDSVTLDDLADFFKQCGVVKMNKRTGQPMIHIYLDKETGKPKGDATVSYEDPPTAKAAVEWFDGKDFQGSKLKVSLARKKPPMNSMRGGLPPREGRGMPPPLRGGPGGPGGPGGPMGRMGGRGGDRGGFPPRGPRGSRGNPSGGGNVQHRAGDWQCPNPGCGNQNFAWRTECNQCKAPKPEGFLPPPFPPPGGDRGRGGPGGMRGGRGGLMDRGGPGGMFRGGRGGDRGGFRGGRGMDRGGFGGGRRGGPGGPPGPLMEQAIAGAPGSAGSAAGSGEQKLISEEDLLATMDAQTRRRERRAEKQAQWKAANPPLDGAGAGAGAGAGAGGLATMDAQTRRRERRAEKQAQWKAANPPLDGAGAGAGAGAGAGGLATMDAQTRRRERRAEKQAQWKAANPPLDGAGAGAGAGAGAGGLATMDAQTRRRERRAEKQAQWKAANPPLESRGPV

SEQ ID NO: 389 - DNA, 3975 bp, Artificial Sequence
  Description of Artificial Sequence: Synthetic polynucleotide
  CMP-SaTr::FUS::PylRS(AF)
atggctgccccgagagacaatgtcactttattattcaagttatactgcttggcagtgatgaccctgatggctgcagtctataccatagctttaagatacacaaggacatcagacaaagaactctacttttcaaccacagccgtgtgtatcacagaagttataaagttattgctaagtgtgggaattttagctaaagaaactggtagtctgggtagattcaaagcatctttaagagaaaatgtcttggggagccccaaggaactgttgaagttaagtgtgccatcgttagtgtatgctgttcagaacaacatggctttcctagctcttagcaatctggatgcagcagtgtaccaggtgacctaccagttgaagattccgtgtactgctttatgcactgttttaatgttaaaccggacactcagcaaattacagtgggtttcagtttttatgctgtgtgctggagttacgcttgtacagtggaaaccagcccaagctacaaaagtggtggtggaacaaaatccattattagggtttggcgctatagctattgctgtattgtgctcaggatttgcaggagtatattttgaaaaagttttaaagagttcagatacttctctttgggtgagaaacattcaaatgtatctatcagggattattgtgacattagctggcgtctacttgtcagatggagctgaaattaaagaaaaaggatttttctatggttacacatattatgtctggtttgtcatctttcttgcaagtgttggtggcctctacacttctgttgtggttaagtacacagacaatatcatgaaaggcttttctgcagcagcggccattgtcctttccaccattgcttcagtaatgctgtttggattacagataacacttacctttgccctgggtactcttcttgtatgtgtttccatatatctctatggattacccagacaagacactacatccatccaacaaggagaaacagcttcaaaggagagagttattggtgtgggagcacccggctccgccggctccgccgccggctccggcatggcctcaaacgattatacccaacaagcaacccaaagctatggggcctaccccacccagcccgggcagggctattcccagcagagcagtcagccctacggacagcagagttacagtggttatagccagtccacggacacttcaggatatggccagagcagctattcttcttatggccagagccagaacacaggctatggaactcagtcaactccccagggatatggctcgactggcggctatggcagtagccagagctcccaatcgtcttacgggcagcagtcctcctaccctggctatggccagcagccagctcccagcagcacctcgggaagttacggtagcagttctcagagcagcagctatgggcagccccagagtgggagctacagccagcagcctagctatggtggacagcagcaaagctatggacagcagcaaagctataatccccctcagggctatggacagcagaaccagtacaacagcagcagtggtggtggaggtggaggtggaggtggaggtaactatggccaagatcaatcctccatgagtagtggtggtggcagtggtggcggttatggcaatcaagaccagagtggtggaggtggcagcggtggctatggacagcaggaccgtggaggccgcggcaggggtggcagtggtggcggcggcggcggcggcggtggtggttacaaccgcagcagtggtggctatgaacccagaggtcgtggaggtggccgtggaggcagaggtggcatgggcggaagtgaccgtggtggcttcaataaatttggtggccctcgggaccaaggatcacgtcatgactccgaacaggataattcagacaacaacaccatctttgtgcaaggcctgggtgagaatgttacaattgagtctgtggctgattacttcaagcagattggtattattaagacaaacaagaaaacgggacagcccatgattaatttgtacacagacagggaaactggcaagctgaagggagaggcaacggtctcttttgatgacccaccttcagctaaagcagctattgactggtttgatggtaaagaattctccggaaatcctatcaaggtctcatttgctactcgccgggcagactttaatcggggtggtggcaatggtcgtggaggccgagggcgaggaggacccatgggccgtggaggctatggaggtggtggcagtggtggtggtggccgaggaggatttcccagtggaggtggtggcggtggaggacagcagcgagctggtgactggaagtgtcctaatcccacctgtgagaatatgaacttctcttggaggaatgaatgcaaccagtgtaaggcccctaaaccagatggcccaggagggggaccaggtggctctcacatggggggtaactacggggatgatcgtcgtggtggcagaggtggtgcgatcgcaggcgccgattacaaggacgatgatgacaagggagcaccaggaagtgctggttctgctgctggtagtggagcgtgcccggtgccgctgcagctgccgccgctggaacgcctgaccctggatgataaaaaaccgctgaataccctgatctctgctactggtctgtggatgagtcgtaccggaaccattcataaaatcaaacaccacgaggttagccgttcgaaaatctatattgagatggcgtgtggcgatcatctggttgtgaacaatagccgctcttctcgtacagcacgtgcactgcgtcaccacaaatatcgtaaaacctgtaaacgttgccgtgtgtccgatgaggatctgaacaaattcctgacaaaagccaatgaggaccaaacaagcgtgaaagtgaaagtcgttagcgctcctacccgtactaaaaaagcaatgccgaaatccgttgctcgtgcccctaaaccactggaaaacactgaagcagcacaggcacagccgtctggaagcaaattctctccggccattcctgtttctacccaggagtccgtttctgttccagcaagtgtgagcaccagcattagcagtattagcaccggtgccaccgctagcgccctggttaaaggcaataccaatccgattacaagcatgtctgccccggttcaagcatcagctccagcactgacaaaatcccaaaccgatcgtctggaggttctgctgaatccgaaagacgaaatcagcctgaattccggcaaaccgtttcgtgaactggagagcgaactgctgtcacgtcgtaaaaaagacctgcaacaaatctatgccgaagaacgtgagaactatctggggaaactggaacgtgaaatcacccgctttttcgtggatcgtggctttctggagatcaaatccccgattctgattcctctggagtatatcgagcgtatgggcatcgacaatgataccgaactgagcaaacaaattttccgtgtggataaaaacttctgtctgcgccctatgctagcaccaaatctggctaactatctgcgcaaactggaccgtgccctgcctgatcctatcaaaatcttcgagatcggcccgtgttatcgtaaagagtccgacggtaaagaacatctggaggagtttaccatgctgaacttttgccaaatgggttcaggttgtactcgtgagaacctggaaagcatcatcaccgattttctgaaccacctgggcattgacttcaaaattgtgggcgacagctgtatggtgtttggcgacaccctggatgtcatgcacggcgacctggaactgtctagtgccgttgtgggcccaatcccgctggatcgtgagtggggtatcgacaaaccttggatcggtgcgggttttggtctggagcgtctgctgaaagtaaaacacgacttcaagaacatcaaacgtgctgcacgttccgagtcctattacaatggtatttctactaacctgtaa

SEQ ID NO: 390 - protein, 1324 aa, Artificial Sequence
  Description of Artificial Sequence: Synthetic polypeptide
  CMP-SaTr::FUS::PylRS(AF)
MAAPRDNVTLLFKLYCLAVMTLMAAVYTIALRYTRTSDKELYFSTTAVCITEVIKLLLSVGILAKETGSLGRFKASLRENVLGSPKELLKLSVPSLVYAVQNNMAFLALSNLDAAVYQVTYQLKIPCTALCTVLMLNRTLSKLQWVSVFMLCAGVTLVQWKPAQATKVVVEQNPLLGFGAIAIAVLCSGFAGVYFEKVLKSSDTSLWVRNIQMYLSGIIVTLAGVYLSDGAEIKEKGFFYGYTYYVWFVIFLASVGGLYTSVVVKYTDNIMKGFSAAAAIVLSTIASVMLFGLQITLTFALGTLLVCVSIYLYGLPRQDTTSIQQGETASKERVIGVGAPGSAGSAAGSGMASNDYTQQATQSYGAYPTQPGQGYSQQSSQPYGQQSYSGYSQSTDTSGYGQSSYSSYGQSQNTGYGTQSTPQGYGSTGGYGSSQSSQSSYGQQSSYPGYGQQPAPSSTSGSYGSSSQSSSYGQPQSGSYSQQPSYGGQQQSYGQQQSYNPPQGYGQQNQYNSSSGGGGGGGGGGNYGQDQSSMSSGGGSGGGYGNQDQSGGGGSGGYGQQDRGGRGRGGSGGGGGGGGGGYNRSSGGYEPRGRGGGRGGRGGMGGSDRGGFNKFGGPRDQGSRHDSEQDNSDNNTIFVQGLGENVTIESVADYFKQIGIIKTNKKTGQPMINLYTDRETGKLKGEATVSFDDPPSAKAAIDWFDGKEFSGNPIKVSFATRRADFNRGGGNGRGGRGRGGPMGRGGYGGGGSGGGGRGGFPSGGGGGGGQQRAGDWKCPNPTCENMNFSWRNECNQCKAPKPDGPGGGPGGSHMGGNYGDDRRGGRGGAIAGADYKDDDDKGAPGSAGSAAGSGACPVPLQLPPLERLTLDDKKPLNTLISATGLWMSRTGTIHKIKHHEVSRSKIYIEMACGDHLVVNNSRSSRTARALRHHKYRKTCKRCRVSDEDLNKFLTKANEDQTSVKVKVVSAPTRTKKAMPKSVARAPKPLENTEAAQAQPSGSKFSPAIPVSTQESVSVPASVSTSISSISTGATASALVKGNTNPITSMSAPVQASAPALTKSQTDRLEVLLNPKDEISLNSGKPFRELESELLSRRKKDLQQIYAEERENYLGKLEREITRFFVDRGFLEIKSPILIPLEYIERMGIDNDTELSKQIFRVDKNFCLRPMLAPNLANYLRKLDRALPDPIKIFEIGPCYRKESDGKEHLEEFTMLNFCQMGSGCTRENLESIITDFLNHLGIDFKIVGDSCMVFGDTLDVMHGDLELSSAVVGPIPLDREWGIDKPWIGAGFGLERLLKVKHDFKNIKRAARSESYYNGISTNL

SEQ ID NO: 391 - DNA, 1584 bp, Artificial Sequence
  Description of Artificial Sequence: Synthetic polynucleotide
  P450 2C11-27::PylRS(AF)
atggaccccgtggtcgtgctgggcctgtgcctgtcatgcctgctgctgctgagcctgtggaagcagagctacggcggaggcgcgatcgcaggcaagcctattcccaaccccctgctgggcctggatagcaccggagcaccaggaagtgctggttctgctgctggtagtggagcgtgcccggtgccgctgcagctgccgccgctggaacgcctgaccctggatgataaaaaaccgctgaataccctgatctctgctactggtctgtggatgagtcgtaccggaaccattcataaaatcaaacaccacgaggttagccgttcgaaaatctatattgagatggcgtgtggcgatcatctggttgtgaacaatagccgctcttctcgtacagcacgtgcactgcgtcaccacaaatatcgtaaaacctgtaaacgttgccgtgtgtccgatgaggatctgaacaaattcctgacaaaagccaatgaggaccaaacaagcgtgaaagtgaaagtcgttagcgctcctacccgtactaaaaaagcaatgccgaaatccgttgctcgtgcccctaaaccactggaaaacactgaagcagcacaggcacagccgtctggaagcaaattctctccggccattcctgtttctacccaggagtccgtttctgttccagcaagtgtgagcaccagcattagcagtattagcaccggtgccaccgctagcgccctggttaaaggcaataccaatccgattacaagcatgtctgccccggttcaagcatcagctccagcactgacaaaatcccaaaccgatcgtctggaggttctgctgaatccgaaagacgaaatcagcctgaattccggcaaaccgtttcgtgaactggagagcgaactgctgtcacgtcgtaaaaaagacctgcaacaaatctatgccgaagaacgtgagaactatctggggaaactggaacgtgaaatcacccgctttttcgtggatcgtggctttctggagatcaaatccccgattctgattcctctggagtatatcgagcgtatgggcatcgacaatgataccgaactgagcaaacaaattttccgtgtggataaaaacttctgtctgcgccctatgctagcaccaaatctggctaactatctgcgcaaactggaccgtgccctgcctgatcctatcaaaatcttcgagatcggcccgtgttatcgtaaagagtccgacggtaaagaacatctggaggagtttaccatgctgaacttttgccaaatgggttcaggttgtactcgtgagaacctggaaagcatcatcaccgattttctgaaccacctgggcattgacttcaaaattgtgggcgacagctgtatggtgtttggcgacaccctggatgtcatgcacggcgacctggaactgtctagtgccgttgtgggcccaatcccgctggatcgtgagtggggtatcgacaaaccttggatcggtgcgggttttggtctggagcgtctgctgaaagtaaaacacgacttcaagaacatcaaacgtgctgcacgttccgagtcctattacaatggtatttctactaacctgtaa

SEQ ID NO: 392 - protein, 527 aa, Artificial Sequence
  Description of Artificial Sequence: Synthetic polypeptide
  P450 2C11-27::PylRS(AF)
MDPVVVLGLCLSCLLLLSLWKQSYGGGAIAGKPIPNPLLGLDSTGAPGSAGSAAGSGACPVPLQLPPLERLTLDDKKPLNTLISATGLWMSRTGTIHKIKHHEVSRSKIYIEMACGDHLVVNNSRSSRTARALRHHKYRKTCKRCRVSDEDLNKFLTKANEDQTSVKVKVVSAPTRTKKAMPKSVARAPKPLENTEAAQAQPSGSKFSPAIPVSTQESVSVPASVSTSISSISTGATASALVKGNTNPITSMSAPVQASAPALTKSQTDRLEVLLNPKDEISLNSGKPFRELESELLSRRKKDLQQIYAEERENYLGKLEREITRFFVDRGFLEIKSPILIPLEYIERMGIDNDTELSKQIFRVDKNFCLRPMLAPNLANYLRKLDRALPDPIKIFEIGPCYRKESDGKEHLEEFTMLNFCQMGSGCTRENLESIITDFLNHLGIDFKIVGDSCMVFGDTLDVMHGDLELSSAVVGPIPLDREWGIDKPWIGAGFGLERLLKVKHDFKNIKRAARSESYYNGISTNL

SEQ ID NO: 393 - DNA, 507 bp, Artificial Sequence
  Description of Artificial Sequence: Synthetic polynucleotide
  P450 2C11-27::MCP
atggaccccgtggtcgtgctgggcctgtgcctgtcatgcctgctgctgctgagcctgtggaagcagagctacggcggaggcgcgatcgcatatccctatgatgtgccggattatgctggagcaccaggaagtgctggttctgctgctggtagtggagcttctaactttactcagttcgttctcgtcgacaatggcggaactggcgacgtgactgtcgccccaagcaacttcgctaacgggatcgctgaatggatcagctctaactcgcgttcacaggcttacaaagtaacctgtagcgttcgtcagagctctgcgcagaatcgcaaatacaccatcaaagtcgaggtgcctaaaggcgcctggcgttcgtacttaaatatggaactaaccattccaattttcgccacgaattccgactgcgagcttattgttaaggcaatgcaaggtctcctaaaagatggaaacccgattccctcagcaatcgcagcaaactccggcatctactaa

SEQ ID NO: 394 - protein, 168 aa, Artificial Sequence
  Description of Artificial Sequence: Synthetic polypeptide
  P450 2C11-27::MCP
MDPVVVLGLCLSCLLLLSLWKQSYGGGAIAYPYDVPDYAGAPGSAGSAAGSGASNFTQFVLVDNGGTGDVTVAPSNFANGIAEWISSNSRSQAYKVTCSVRQSSAQNRKYTIKVEVPKGAWRSYLNMELTIPIFATNSDCELIVKAMQGLLKDGNPIPSAIAANSGIY

SEQ ID NO: 395 - DNA, 3018 bp, Artificial Sequence
  Description of Artificial Sequence: Synthetic polynucleotide
  P450 2C11-27::FUS::PylRS(AF)
atggaccccgtggtcgtgctgggcctgtgcctgtcatgcctgctgctgctgagcctgtggaagcagagctacggcggaggcatggcctcaaacgattatacccaacaagcaacccaaagctatggggcctaccccacccagcccgggcagggctattcccagcagagcagtcagccctacggacagcagagttacagtggttatagccagtccacggacacttcaggatatggccagagcagctattcttcttatggccagagccagaacacaggctatggaactcagtcaactccccagggatatggctcgactggcggctatggcagtagccagagctcccaatcgtcttacgggcagcagtcctcctaccctggctatggccagcagccagctcccagcagcacctcgggaagttacggtagcagttctcagagcagcagctatgggcagccccagagtgggagctacagccagcagcctagctatggtggacagcagcaaagctatggacagcagcaaagctataatccccctcagggctatggacagcagaaccagtacaacagcagcagtggtggtggaggtggaggtggaggtggaggtaactatggccaagatcaatcctccatgagtagtggtggtggcagtggtggcggttatggcaatcaagaccagagtggtggaggtggcagcggtggctatggacagcaggaccgtggaggccgcggcaggggtggcagtggtggcggcggcggcggcggcggtggtggttacaaccgcagcagtggtggctatgaacccagaggtcgtggaggtggccgtggaggcagaggtggcatgggcggaagtgaccgtggtggcttcaataaatttggtggccctcgggaccaaggatcacgtcatgactccgaacaggataattcagacaacaacaccatctttgtgcaaggcctgggtgagaatgttacaattgagtctgtggctgattacttcaagcagattggtattattaagacaaacaagaaaacgggacagcccatgattaatttgtacacagacagggaaactggcaagctgaagggagaggcaacggtctcttttgatgacccaccttcagctaaagcagctattgactggtttgatggtaaagaattctccggaaatcctatcaaggtctcatttgctactcgccgggcagactttaatcggggtggtggcaatggtcgtggaggccgagggcgaggaggacccatgggccgtggaggctatggaggtggtggcagtggtggtggtggccgaggaggatttcccagtggaggtggtggcggtggaggacagcagcgagctggtgactggaagtgtcctaatcccacctgtgagaatatgaacttctcttggaggaatgaatgcaaccagtgtaaggcccctaaaccagatggcccaggagggggaccaggtggctctcacatggggggtaactacggggatgatcgtcgtggtggcagaggaggcgcgatcgcaggcaagcctattcccaaccccctgctgggcctggatagcaccggagcaccaggaagtgctggttctgctgctggtagtggagcgtgcccggtgccgctgcagctgccgccgctggaacgcctgaccctggatgataaaaaaccgctgaataccctgatctctgctactggtctgtggatgagtcgtaccggaaccattcataaaatcaaacaccacgaggttagccgttcgaaaatctatattgagatggcgtgtggcgatcatctggttgtgaacaatagccgctcttctcgtacagcacgtgcactgcgtcaccacaaatatcgtaaaacctgtaaacgttgccgtgtgtccgatgaggatctgaacaaattcctgacaaaagccaatgaggaccaaacaagcgtgaaagtgaaagtcgttagcgctcctacccgtactaaaaaagcaatgccgaaatccgttgctcgtgcccctaaaccactggaaaacactgaagcagcacaggcacagccgtctggaagcaaattctctccggccattcctgtttctacccaggagtccgtttctgttccagcaagtgtgagcaccagcattagcagtattagcaccggtgccaccgctagcgccctggttaaaggcaataccaatccgattacaagcatgtctgccccggttcaagcatcagctccagcactgacaaaatcccaaaccgatcgtctggaggttctgctgaatccgaaagacgaaatcagcctgaattccggcaaaccgtttcgtgaactggagagcgaactgctgtcacgtcgtaaaaaagacctgcaacaaatctatgccgaagaacgtgagaactatctggggaaactggaacgtgaaatcacccgctttttcgtggatcgtggctttctggagatcaaatccccgattctgattcctctggagtatatcgagcgtatgggcatcgacaatgataccgaactgagcaaacaaattttccgtgtggataaaaacttctgtctgcgccctatgctagcaccaaatctggctaactatctgcgcaaactggaccgtgccctgcctgatcctatcaaaatcttcgagatcggcccgtgttatcgtaaagagtccgacggtaaagaacatctggaggagtttaccatgctgaacttttgccaaatgggttcaggttgtactcgtgagaacctggaaagcatcatcaccgattttctgaaccacctgggcattgacttcaaaattgtgggcgacagctgtatggtgtttggcgacaccctggatgtcatgcacggcgacctggaactgtctagtgccgttgtgggcccaatcccgctggatcgtgagtggggtatcgacaaaccttggatcggtgcgggttttggtctggagcgtctgctgaaagtaaaacacgacttcaagaacatcaaacgtgctgcacgttccgagtcctattacaatggtatttctactaacctgtaa

SEQ ID NO: 396 - protein, 1005 aa, Artificial Sequence
  Description of Artificial Sequence: Synthetic polypeptide
  P450 2C11-27::FUS::PylRS(AF)
MDPVVVLGLCLSCLLLLSLWKQSYGGGMASNDYTQQATQSYGAYPTQPGQGYSQQSSQPYGQQSYSGYSQSTDTSGYGQSSYSSYGQSQNTGYGTQSTPQGYGSTGGYGSSQSSQSSYGQQSSYPGYGQQPAPSSTSGSYGSSSQSSSYGQPQSGSYSQQPSYGGQQQSYGQQQSYNPPQGYGQQNQYNSSSGGGGGGGGGGNYGQDQSSMSSGGGSGGGYGNQDQSGGGGSGGYGQQDRGGRGRGGSGGGGGGGGGGYNRSSGGYEPRGRGGGRGGRGGMGGSDRGGFNKFGGPRDQGSRHDSEQDNSDNNTIFVQGLGENVTIESVADYFKQIGIIKTNKKTGQPMINLYTDRETGKLKGEATVSFDDPPSAKAAIDWFDGKEFSGNPIKVSFATRRADFNRGGGNGRGGRGRGGPMGRGGYGGGGSGGGGRGGFPSGGGGGGGQQRAGDWKCPNPTCENMNFSWRNECNQCKAPKPDGPGGGPGGSHMGGNYGDDRRGGRGGAIAGKPIPNPLLGLDSTGAPGSAGSAAGSGACPVPLQLPPLERLTLDDKKPLNTLISATGLWMSRTGTIHKIKHHEVSRSKIYIEMACGDHLVVNNSRSSRTARALRHHKYRKTCKRCRVSDEDLNKFLTKANEDQTSVKVKVVSAPTRTKKAMPKSVARAPKPLENTEAAQAQPSGSKFSPAIPVSTQESVSVPASVSTSISSISTGATASALVKGNTNPITSMSAPVQASAPALTKSQTDRLEVLLNPKDEISLNSGKPFRELESELLSRRKKDLQQIYAEERENYLGKLEREITRFFVDRGFLEIKSPILIPLEYIERMGIDNDTELSKQIFRVDKNFCLRPMLAPNLANYLRKLDRALPDPIKIFEIGPCYRKESDGKEHLEEFTMLNFCQMGSGCTRENLESIITDFLNHLGIDFKIVGDSCMVFGDTLDVMHGDLELSSAVVGPIPLDREWGIDKPWIGAGFGLERLLKVKHDFKNIKRAARSESYYNGISTNL

SEQ ID NO: 397 - DNA, 2391 bp, Artificial Sequence
  Description of Artificial Sequence: Synthetic polynucleotide
  P450 2C11-27::EWSR1::MCP
atggaccccgtggtcgtgctgggcctgtgcctgtcatgcctgctgctgctgagcctgtggaagcagagctacggcggaggcatggcgtccacggattacagtacctatagccaagctgcagcgcagcagggctacagtgcttacaccgcccagcccactcaaggatatgcacagaccacccaggcatatgggcaacaaagctatggaacctatggacagcccactgatgtcagctatacccaggctcagaccactgcaacctatgggcagaccgcctatgcaacttcttatggacagcctcccactggttatactactccaactgccccccaggcatacagccagcctgtccaggggtatggcactggtgcttatgataccaccactgctacagtcaccaccacccaggcctcctatgcagctcagtctgcatatggcactcagcctgcttatccagcctatgggcagcagccagcagccactgcacctacaagaccgcaggatggaaacaagcccactgagactagtcaacctcaatctagcacagggggttacaaccagcccagcctaggatatggacagagtaactacagttatccccaggtacctgggagctaccccatgcagccagtcactgcacctccatcctaccctcctaccagctattcctctacacagccgactagttatgatcagagcagttactctcagcagaacacctatgggcaaccgagcagctatggacagcagagtagctatggtcaacaaagcagctatgggcagcagcctcccactagttacccaccccaaactggatcctacagccaagctccaagtcaatatagccaacagagcagcagctacgggcagcagagttcattccgacaggaccaccccagtagcatgggtgtttatgggcaggagtctggaggattttccggaccaggagagaaccggagcatgagtggccctgataaccggggcaggggaagagggggatttgatcgtggaggcatgagcagaggtgggcggggaggaggacgcggtggaatgggcagcgctggagagcgaggtggcttcaataagcctggtggacccatggatgaaggaccagatcttgatctaggcccacctgtagatccagatgaagactctgacaacagtgcaatttatgtacaaggattaaatgacagtgtgactctagatgatctggcagacttctttaagcagtgtggggttgttaagatgaacaagagaactgggcaacccatgatccacatctacctggacaaggaaacaggaaagcccaaaggcgatgccacagtgtcctatgaagacccacctactgccaaggctgccgtggaatggtttgatgggaaagattttcaagggagcaaacttaaagtctcccttgctcggaagaagcctccaatgaacagtatgcggggtggtctgccaccccgtgagggcagaggcatgccaccaccactccgtggaggtccaggaggcccaggaggtcctgggggacccatgggtcgcatgggaggccgtggaggagatagaggaggcttccctccaagaggaccccggggttcccgagggaacccctctggaggaggaaacgtccagcaccgagctggagactggcagtgtcccaatccgggttgtggaaaccagaacttcgcctggagaacagagtgcaaccagtgtaaggccccaaagcctgaaggcttcctcccgccaccctttccgcccccgggtggtgatcgtggcagaggtggccctggtggcatgcggggaggaagaggtggcctcatggatcgtggtggtcccggtggaatgttcagaggtggccgtggtggagacagaggtggcttccgtggtggccggggcatggaccgaggtggctttggtggaggaagacgaggtggccctggggggccccctggacctttgatggaacaggcgatcgcatatccctatgatgtgccggattatgctggagcaccaggaagtgctggttctgctgctggtagtggagcttctaactttactcagttcgttctcgtcgacaatggcggaactggcgacgtgactgtcgccccaagcaacttcgctaacgggatcgctgaatggatcagctctaactcgcgttcacaggcttacaaagtaacctgtagcgttcgtcagagctctgcgcagaatcgcaaatacaccatcaaagtcgaggtgcctaaaggcgcctggcgttcgtacttaaatatggaactaaccattccaattttcgccacgaattccgactgcgagcttattgttaaggcaatgcaaggtctcctaaaagatggaaacccgattccctcagcaatcgcagcaaactccggcatctactaa

SEQ ID NO: 398 - protein, 796 aa, Artificial Sequence
  Description of Artificial Sequence: Synthetic polypeptide
  P450 2C11-27::EWSR1::MCP
MDPVVVLGLCLSCLLLLSLWKQSYGGGMASTDYSTYSQAAAQQGYSAYTAQPTQGYAQTTQAYGQQSYGTYGQPTDVSYTQAQTTATYGQTAYATSYGQPPTGYTTPTAPQAYSQPVQGYGTGAYDTTTATVTTTQASYAAQSAYGTQPAYPAYGQQPAATAPTRPQDGNKPTETSQPQSSTGGYNQPSLGYGQSNYSYPQVPGSYPMQPVTAPPSYPPTSYSSTQPTSYDQSSYSQQNTYGQPSSYGQQSSYGQQSSYGQQPPTSYPPQTGSYSQAPSQYSQQSSSYGQQSSFRQDHPSSMGVYGQESGGFSGPGENRSMSGPDNRGRGRGGFDRGGMSRGGRGGGRGGMGSAGERGGFNKPGGPMDEGPDLDLGPPVDPDEDSDNSAIYVQGLNDSVTLDDLADFFKQCGVVKMNKRTGQPMIHIYLDKETGKPKGDATVSYEDPPTAKAAVEWFDGKDFQGSKLKVSLARKKPPMNSMRGGLPPREGRGMPPPLRGGPGGPGGPGGPMGRMGGRGGDRGGFPPRGPRGSRGNPSGGGNVQHRAGDWQCPNPGCGNQNFAWRTECNQCKAPKPEGFLPPPFPPPGGDRGRGGPGGMRGGRGGLMDRGGPGGMFRGGRGGDRGGFRGGRGMDRGGFGGGRRGGPGGPPGPLMEQAIAYPYDVPDYAGAPGSAGSAAGSGASNFTQFVLVDNGGTGDVTVAPSNFANGIAEWISSNSRSQAYKVTCSVRQSSAQNRKYTIKVEVPKGAWRSYLNMELTIPIFATNSDCELIVKAMQGLLKDGNPIPSAIAANSGIY

SEQ ID NO: 399 - DNA, 3420 bp, Artificial Sequence
  Description of Artificial Sequence: Synthetic polynucleotide
  P450 2C11-27::FUS::MCP::PylRS(AF)
atggaccccgtggtcgtgctgggcctgtgcctgtcatgcctgctgctgctgagcctgtggaagcagagctacggcggaggcatggcctcaaacgattatacccaacaagcaacccaaagctatggggcctaccccacccagcccgggcagggctattcccagcagagcagtcagccctacggacagcagagttacagtggttatagccagtccacggacacttcaggatatggccagagcagctattcttcttatggccagagccagaacacaggctatggaactcagtcaactccccagggatatggctcgactggcggctatggcagtagccagagctcccaatcgtcttacgggcagcagtcctcctaccctggctatggccagcagccagctcccagcagcacctcgggaagttacggtagcagttctcagagcagcagctatgggcagccccagagtgggagctacagccagcagcctagctatggtggacagcagcaaagctatggacagcagcaaagctataatccccctcagggctatggacagcagaaccagtacaacagcagcagtggtggtggaggtggaggtggaggtggaggtaactatggccaagatcaatcctccatgagtagtggtggtggcagtggtggcggttatggcaatcaagaccagagtggtggaggtggcagcggtggctatggacagcaggaccgtggaggccgcggcaggggtggcagtggtggcggcggcggcggcggcggtggtggttacaaccgcagcagtggtggctatgaacccagaggtcgtggaggtggccgtggaggcagaggtggcatgggcggaagtgaccgtggtggcttcaataaatttggtggccctcgggaccaaggatcacgtcatgactccgaacaggataattcagacaacaacaccatctttgtgcaaggcctgggtgagaatgttacaattgagtctgtggctgattacttcaagcagattggtattattaagacaaacaagaaaacgggacagcccatgattaatttgtacacagacagggaaactggcaagctgaagggagaggcaacggtctcttttgatgacccaccttcagctaaagcagctattgactggtttgatggtaaagaattctccggaaatcctatcaaggtctcatttgctactcgccgggcagactttaatcggggtggtggcaatggtcgtggaggccgagggcgaggaggacccatgggccgtggaggctatggaggtggtggcagtggtggtggtggccgaggaggatttcccagtggaggtggtggcggtggaggacagcagcgagctggtgactggaagtgtcctaatcccacctgtgagaatatgaacttctcttggaggaatgaatgcaaccagtgtaaggcccctaaaccagatggcccaggagggggaccaggtggctctcacatggggggtaactacggggatgatcgtcgtggtggcagaggaggcgcgatcgcatatccctatgatgtgccggattatgctggagcaccaggaagtgctggttctgctgctggtagtggagcttctaactttactcagttcgttctcgtcgacaatggcggaactggcgacgtgactgtcgccccaagcaacttcgctaacgggatcgctgaatggatcagctctaactcgcgttcacaggcttacaaagtaacctgtagcgttcgtcagagctctgcgcagaatcgcaaatacaccatcaaagtcgaggtgcctaaaggcgcctggcgttcgtacttaaatatggaactaaccattccaattttcgccacgaattccgactgcgagcttattgttaaggcaatgcaaggtctcctaaaagatggaaacccgattccctcagcaatcgcagcaaactccggcatctacggcgccgattacaaggacgatgatgacaagggagcaccaggaagtgctggttctgctgctggtagtggagcgtgcccggtgccgctgcagctgccgccgctggaacgcctgaccctggatgataaaaaaccgctgaataccctgatctctgctactggtctgtggatgagtcgtaccggaaccattcataaaatcaaacaccacgaggttagccgttcgaaaatctatattgagatggcgtgtggcgatcatctggttgtgaacaatagccgctcttctcgtacagcacgtgcactgcgtcaccacaaatatcgtaaaacctgtaaacgttgccgtgtgtccgatgaggatctgaacaaattcctgacaaaagccaatgaggaccaaacaagcgtgaaagtgaaagtcgttagcgctcctacccgtactaaaaaagcaatgccgaaatccgttgctcgtgcccctaaaccactggaaaacactgaagcagcacaggcacagccgtctggaagcaaattctctccggccattcctgtttctacccaggagtccgtttctgttccagcaagtgtgagcaccagcattagcagtattagcaccggtgccaccgctagcgccctggttaaaggcaataccaatccgattacaagcatgtctgccccggttcaagcatcagctccagcactgacaaaatcccaaaccgatcgtctggaggttctgctgaatccgaaagacgaaatcagcctgaattccggcaaaccgtttcgtgaactggagagcgaactgctgtcacgtcgtaaaaaagacctgcaacaaatctatgccgaagaacgtgagaactatctggggaaactggaacgtgaaatcacccgctttttcgtggatcgtggctttctggagatcaaatccccgattctgattcctctggagtatatcgagcgtatgggcatcgacaatgataccgaactgagcaaacaaattttccgtgtggataaaaacttctgtctgcgccctatgctagcaccaaatctggctaactatctgcgcaaactggaccgtgccctgcctgatcctatcaaaatcttcgagatcggcccgtgttatcgtaaagagtccgacggtaaagaacatctggaggagtttaccatgctgaacttttgccaaatgggttcaggttgtactcgtgagaacctggaaagcatcatcaccgattttctgaaccacctgggcattgacttcaaaattgtgggcgacagctgtatggtgtttggcgacaccctggatgtcatgcacggcgacctggaactgtctagtgccgttgtgggcccaatcccgctggatcgtgagtggggtatcgacaaaccttggatcggtgcgggttttggtctggagcgtctgctgaaagtaaaacacgacttcaagaacatcaaacgtgctgcacgttccgagtcctattacaatggtatttctactaacctgtaa

SEQ ID NO: 400 - protein, 1139 aa, Artificial Sequence
  Description of Artificial Sequence: Synthetic polypeptide
  P450 2C11-27::FUS::MCP::PylRS(AF)
MDPVVVLGLCLSCLLLLSLWKQSYGGGMASNDYTQQATQSYGAYPTQPGQGYSQQSSQPYGQQSYSGYSQSTDTSGYGQSSYSSYGQSQNTGYGTQSTPQGYGSTGGYGSSQSSQSSYGQQSSYPGYGQQPAPSSTSGSYGSSSQSSSYGQPQSGSYSQQPSYGGQQQSYGQQQSYNPPQGYGQQNQYNSSSGGGGGGGGGGNYGQDQSSMSSGGGSGGGYGNQDQSGGGGSGGYGQQDRGGRGRGGSGGGGGGGGGGYNRSSGGYEPRGRGGGRGGRGGMGGSDRGGFNKFGGPRDQGSRHDSEQDNSDNNTIFVQGLGENVTIESVADYFKQIGIIKTNKKTGQPMINLYTDRETGKLKGEATVSFDDPPSAKAAIDWFDGKEFSGNPIKVSFATRRADFNRGGGNGRGGRGRGGPMGRGGYGGGGSGGGGRGGFPSGGGGGGGQQRAGDWKCPNPTCENMNFSWRNECNQCKAPKPDGPGGGPGGSHMGGNYGDDRRGGRGGAIAYPYDVPDYAGAPGSAGSAAGSGASNFTQFVLVDNGGTGDVTVAPSNFANGIAEWISSNSRSQAYKVTCSVRQSSAQNRKYTIKVEVPKGAWRSYLNMELTIPIFATNSDCELIVKAMQGLLKDGNPIPSAIAANSGIYGADYKDDDDKGAPGSAGSAAGSGACPVPLQLPPLERLTLDDKKPLNTLISATGLWMSRTGTIHKIKHHEVSRSKIYIEMACGDHLVVNNSRSSRTARALRHHKYRKTCKRCRVSDEDLNKFLTKANEDQTSVKVKVVSAPTRTKKAMPKSVARAPKPLENTEAAQAQPSGSKFSPAIPVSTQESVSVPASVSTSISSISTGATASALVKGNTNPITSMSAPVQASAPALTKSQTDRLEVLLNPKDEISLNSGKPFRELESELLSRRKKDLQQIYAEERENYLGKLEREITRFFVDRGFLEIKSPILIPLEYIERMGIDNDTELSKQIFRVDKNFCLRPMLAPNLANYLRKLDRALPDPIKIFEIGPCYRKESDGKEHLEEFTMLNFCQMGSGCTRENLESIITDFLNHLGIDFKIVGDSCMVFGDTLDVMHGDLELSSAVVGPIPLDREWGIDKPWIGAGFGLERLLKVKHDFKNIKRAARSESYYNGISTNL

SEQ ID NO: 401 - DNA, 3426 bp, Artificial Sequence
  Description of Artificial Sequence: Synthetic polynucleotide
  P450 2C11-29::FUS::MCP::PylRS(AF)
atggaccccgtggtcgtgctgggcctgtgcctgtcatgcctgctgctgctgagcctgtggaagcagagctacggcggaggcaagctgatggcctcaaacgattatacccaacaagcaacccaaagctatggggcctaccccacccagcccgggcagggctattcccagcagagcagtcagccctacggacagcagagttacagtggttatagccagtccacggacacttcaggatatggccagagcagctattcttcttatggccagagccagaacacaggctatggaactcagtcaactccccagggatatggctcgactggcggctatggcagtagccagagctcccaatcgtcttacgggcagcagtcctcctaccctggctatggccagcagccagctcccagcagcacctcgggaagttacggtagcagttctcagagcagcagctatgggcagccccagagtgggagctacagccagcagcctagctatggtggacagcagcaaagctatggacagcagcaaagctataatccccctcagggctatggacagcagaaccagtacaacagcagcagtggtggtggaggtggaggtggaggtggaggtaactatggccaagatcaatcctccatgagtagtggtggtggcagtggtggcggttatggcaatcaagaccagagtggtggaggtggcagcggtggctatggacagcaggaccgtggaggccgcggcaggggtggcagtggtggcggcggcggcggcggcggtggtggttacaaccgcagcagtggtggctatgaacccagaggtcgtggaggtggccgtggaggcagaggtggcatgggcggaagtgaccgtggtggcttcaataaatttggtggccctcgggaccaaggatcacgtcatgactccgaacaggataattcagacaacaacaccatctttgtgcaaggcctgggtgagaatgttacaattgagtctgtggctgattacttcaagcagattggtattattaagacaaacaagaaaacgggacagcccatgattaatttgtacacagacagggaaactggcaagctgaagggagaggcaacggtctcttttgatgacccaccttcagctaaagcagctattgactggtttgatggtaaagaattctccggaaatcctatcaaggtctcatttgctactcgccgggcagactttaatcggggtggtggcaatggtcgtggaggccgagggcgaggaggacccatgggccgtggaggctatggaggtggtggcagtggtggtggtggccgaggaggatttcccagtggaggtggtggcggtggaggacagcagcgagctggtgactggaagtgtcctaatcccacctgtgagaatatgaacttctcttggaggaatgaatgcaaccagtgtaaggcccctaaaccagatggcccaggagggggaccaggtggctctcacatggggggtaactacggggatgatcgtcgtggtggcagaggaggcgcgatcgcatatccctatgatgtgccggattatgctggagcaccaggaagtgctggttctgctgctggtagtggagcttctaactttactcagttcgttctcgtcgacaatggcggaactggcgacgtgactgtcgccccaagcaacttcgctaacgggatcgctgaatggatcagctctaactcgcgttcacaggcttacaaagtaacctgtagcgttcgtcagagctctgcgcagaatcgcaaatacaccatcaaagtcgaggtgcctaaaggcgcctggcgttcgtacttaaatatggaactaaccattccaattttcgccacgaattccgactgcgagcttattgttaaggcaatgcaaggtctcctaaaagatggaaacccgattccctcagcaatcgcagcaaactccggcatctacggcgccgattacaaggacgatgatgacaagggagcaccaggaagtgctggttctgctgctggtagtggagcgtgcccggtgccgctgcagctgccgccgctggaacgcctgaccctggatgataaaaaaccgctgaataccctgatctctgctactggtctgtggatgagtcgtaccggaaccattcataaaatcaaacaccacgaggttagccgttcgaaaatctatattgagatggcgtgtggcgatcatctggttgtgaacaatagccgctcttctcgtacagcacgtgcactgcgtcaccacaaatatcgtaaaacctgtaaacgttgccgtgtgtccgatgaggatctgaacaaattcctgacaaaagccaatgaggaccaaacaagcgtgaaagtgaaagtcgttagcgctcctacccgtactaaaaaagcaatgccgaaatccgttgctcgtgcccctaaaccactggaaaacactgaagcagcacaggcacagccgtctggaagcaaattctctccggccattcctgtttctacccaggagtccgtttctgttccagcaagtgtgagcaccagcattagcagtattagcaccggtgccaccgctagcgccctggttaaaggcaataccaatccgattacaagcatgtctgccccggttcaagcatcagctccagcactgacaaaatcccaaaccgatcgtctggaggttctgctgaatccgaaagacgaaatcagcctgaattccggcaaaccgtttcgtgaactggagagcgaactgctgtcacgtcgtaaaaaagacctgcaacaaatctatgccgaagaacgtgagaactatctggggaaactggaacgtgaaatcacccgctttttcgtggatcgtggctttctggagatcaaatccccgattctgattcctctggagtatatcgagcgtatgggcatcgacaatgataccgaactgagcaaacaaattttccgtgtggataaaaacttctgtctgcgccctatgctagcaccaaatctggctaactatctgcgcaaactggaccgtgccctgcctgatcctatcaaaatcttcgagatcggcccgtgttatcgtaaagagtccgacggtaaagaacatctggaggagtttaccatgctgaacttttgccaaatgggttcaggttgtactcgtgagaacctggaaagcatcatcaccgattttctgaaccacctgggcattgacttcaaaattgtgggcgacagctgtatggtgtttggcgacaccctggatgtcatgcacggcgacctggaactgtctagtgccgttgtgggcccaatcccgctggatcgtgagtggggtatcgacaaaccttggatcggtgcgggttttggtctggagcgtctgctgaaagtaaaacacgacttcaagaacatcaaacgtgctgcacgttccgagtcctattacaatggtatttctactaacctgtaa

SEQ ID NO: 402 - protein, 1141 aa, Artificial Sequence
  Description of Artificial Sequence: Synthetic polypeptide
  P450 2C11-29::FUS::MCP::PylRS(AF)
MDPVVVLGLCLSCLLLLSLWKQSYGGGKLMASNDYTQQATQSYGAYPTQPGQGYSQQSSQPYGQQSYSGYSQSTDTSGYGQSSYSSYGQSQNTGYGTQSTPQGYGSTGGYGSSQSSQSSYGQQSSYPGYGQQPAPSSTSGSYGSSSQSSSYGQPQSGSYSQQPSYGGQQQSYGQQQSYNPPQGYGQQNQYNSSSGGGGGGGGGGNYGQDQSSMSSGGGSGGGYGNQDQSGGGGSGGYGQQDRGGRGRGGSGGGGGGGGGGYNRSSGGYEPRGRGGGRGGRGGMGGSDRGGFNKFGGPRDQGSRHDSEQDNSDNNTIFVQGLGENVTIESVADYFKQIGIIKTNKKTGQPMINLYTDRETGKLKGEATVSFDDPPSAKAAIDWFDGKEFSGNPIKVSFATRRADFNRGGGNGRGGRGRGGPMGRGGYGGGGSGGGGRGGFPSGGGGGGGQQRAGDWKCPNPTCENMNFSWRNECNQCKAPKPDGPGGGPGGSHMGGNYGDDRRGGRGGAIAYPYDVPDYAGAPGSAGSAAGSGASNFTQFVLVDNGGTGDVTVAPSNFANGIAEWISSNSRSQAYKVTCSVRQSSAQNRKYTIKVEVPKGAWRSYLNMELTIPIFATNSDCELIVKAMQGLLKDGNPIPSAIAANSGIYGADYKDDDDKGAPGSAGSAAGSGACPVPLQLPPLERLTLDDKKPLNTLISATGLWMSRTGTIHKIKHHEVSRSKIYIEMACGDHLVVNNSRSSRTARALRHHKYRKTCKRCRVSDEDLNKFLTKANEDQTSVKVKVVSAPTRTKKAMPKSVARAPKPLENTEAAQAQPSGSKFSPAIPVSTQESVSVPASVSTSISSISTGATASALVKGNTNPITSMSAPVQASAPALTKSQTDRLEVLLNPKDEISLNSGKPFRELESELLSRRKKDLQQIYAEERENYLGKLEREITRFFVDRGFLEIKSPILIPLEYIERMGIDNDTELSKQIFRVDKNFCLRPMLAPNLANYLRKLDRALPDPIKIFEIGPCYRKESDGKEHLEEFTMLNFCQMGSGCTRENLESIITDFLNHLGIDFKIVGDSCMVFGDTLDVMHGDLELSSAVVGPIPLDREWGIDKPWIGAGFGLERLLKVKHDFKNIKRAARSESYYNGISTNL

SEQ ID NO: 403 - DNA, 2286 bp, Artificial Sequence
  Description of Artificial Sequence: Synthetic polynucleotide
  EB1::PylRS(AF)
atggcagtgaacgtatactcaacgtcagtgaccagtgataacctaagtcgacatgacatgctggcctggatcaatgagtctctgcagttgaatctgacaaagatcgaacagttgtgctcaggggctgcgtattgtcagtttatggacatgctgttccctggctccattgccttgaagaaagtgaaattccaagctaagctagaacacgagtacatccagaacttcaaaatactacaagcaggttttaagagaatgggtgttgacaaaataattcctgtggacaaattagtaaaaggaaagtttcaggacaattttgaattcgttcagtggttcaagaagtttttcgatgcaaactatgatggaaaagactatgaccctgtggctgccagacaaggtcaagaaactgcagtggctccttcccttgttgctccagctctgaataaaccgaagaaacctctcacttctagcagtgcagctccccagaggcccatctcaacacagagaaccgctgcggctcctaaggctggccctggtgtggtgcgaaagaaccctggtgtgggcaacggagatgacgaggcagctgagttgatgcagcaggtcaacgtattgaaacttactgttgaagacttggagaaagagagggatttctacttcggaaagctacggaacattgaattgatttgccaggagaacgagggggaaaacgaccctgtattgcagaggattgtagacattctgtatgccacagatgaaggctttgtgatacctgatgaagggggcccacaggaggagcaagaagagtatggcgccgattacaaggacgatgatgacaagggagcaccaggaagtgctggttctgctgctggtagtggagcgtgcccggtgccgctgcagctgccgccgctggaacgcctgaccctggatgataaaaaaccgctgaataccctgatctctgctactggtctgtggatgagtcgtaccggaaccattcataaaatcaaacaccacgaggttagccgttcgaaaatctatattgagatggcgtgtggcgatcatctggttgtgaacaatagccgctcttctcgtacagcacgtgcactgcgtcaccacaaatatcgtaaaacctgtaaacgttgccgtgtgtccgatgaggatctgaacaaattcctgacaaaagccaatgaggaccaaacaagcgtgaaagtgaaagtcgttagcgctcctacccgtactaaaaaagcaatgccgaaatccgttgctcgtgcccctaaaccactggaaaacactgaagcagcacaggcacagccgtctggaagcaaattctctccggccattcctgtttctacccaggagtccgtttctgttccagcaagtgtgagcaccagcattagcagtattagcaccggtgccaccgctagcgccctggttaaaggcaataccaatccgattacaagcatgtctgccccggttcaagcatcagctccagcactgacaaaatcccaaaccgatcgtctggaggttctgctgaatccgaaagacgaaatcagcctgaattccggcaaaccgtttcgtgaactggagagcgaactgctgtcacgtcgtaaaaaagacctgcaacaaatctatgccgaagaacgtgagaactatctggggaaactggaacgtgaaatcacccgctttttcgtggatcgtggctttctggagatcaaatccccgattctgattcctctggagtatatcgagcgtatgggcatcgacaatgataccgaactgagcaaacaaattttccgtgtggataaaaacttctgtctgcgccctatgctagcaccaaatctggctaactatctgcgcaaactggaccgtgccctgcctgatcctatcaaaatcttcgagatcggcccgtgttatcgtaaagagtccgacggtaaagaacatctggaggagtttaccatgctgaacttttgccaaatgggttcaggttgtactcgtgagaacctggaaagcatcatcaccgattttctgaaccacctgggcattgacttcaaaattgtgggcgacagctgtatggtgtttggcgacaccctggatgtcatgcacggcgacctggaactgtctagtgccgttgtgggcccaatcccgctggatcgtgagtggggtatcgacaaaccttggatcggtgcgggttttggtctggagcgtctgctgaaagtaaaacacgacttcaagaacatcaaacgtgctgcacgttccgagtcctattacaatggtatttctactaacctgtaa

SEQ ID NO: 404 - protein, 761 aa, Artificial Sequence
  Description of Artificial Sequence: Synthetic polypeptide
  EB1::PylRS(AF)
MAVNVYSTSVTSDNLSRHDMLAWINESLQLNLTKIEQLCSGAAYCQFMDMLFPGSIALKKVKFQAKLEHEYIQNFKILQAGFKRMGVDKIIPVDKLVKGKFQDNFEFVQWFKKFFDANYDGKDYDPVAARQGQETAVAPSLVAPALNKPKKPLTSSSAAPQRPISTQRTAAAPKAGPGVVRKNPGVGNGDDEAAELMQQVNVLKLTVEDLEKERDFYFGKLRNIELICQENEGENDPVLQRIVDILYATDEGFVIPDEGGPQEEQEEYGADYKDDDDKGAPGSAGSAAGSGACPVPLQLPPLERLTLDDKKPLNTLISATGLWMSRTGTIHKIKHHEVSRSKIYIEMACGDHLVVNNSRSSRTARALRHHKYRKTCKRCRVSDEDLNKFLTKANEDQTSVKVKVVSAPTRTKKAMPKSVARAPKPLENTEAAQAQPSGSKFSPAIPVSTQESVSVPASVSTSISSISTGATASALVKGNTNPITSMSAPVQASAPALTKSQTDRLEVLLNPKDEISLNSGKPFRELESELLSRRKKDLQQIYAEERENYLGKLEREITRFFVDRGFLEIKSPILIPLEYIERMGIDNDTELSKQIFRVDKNFCLRPMLAPNLANYLRKLDRALPDPIKIFEIGPCYRKESDGKEHLEEFTMLNFCQMGSGCTRENLESIITDFLNHLGIDFKIVGDSCMVFGDTLDVMHGDLELSSAVVGPIPLDREWGIDKPWIGAGFGLERLLKVKHDFKNIKRAARSESYYNGISTNL

SEQ ID NO: 405 - DNA, 2286 bp, Artificial Sequence
  Description of Artificial Sequence: Synthetic polynucleotide
  EB1::PylRS(AA)
atggcagtgaacgtatactcaacgtcagtgaccagtgataacctaagtcgacatgacatgctggcctggatcaatgagtctctgcagttgaatctgacaaagatcgaacagttgtgctcaggggctgcgtattgtcagtttatggacatgctgttccctggctccattgccttgaagaaagtgaaattccaagctaagctagaacacgagtacatccagaacttcaaaatactacaagcaggttttaagagaatgggtgttgacaaaataattcctgtggacaaattagtaaaaggaaagtttcaggacaattttgaattcgttcagtggttcaagaagtttttcgatgcaaactatgatggaaaagactatgaccctgtggctgccagacaaggtcaagaaactgcagtggctccttcccttgttgctccagctctgaataaaccgaagaaacctctcacttctagcagtgcagctccccagaggcccatctcaacacagagaaccgctgcggctcctaaggctggccctggtgtggtgcgaaagaaccctggtgtgggcaacggagatgacgaggcagctgagttgatgcagcaggtcaacgtattgaaacttactgttgaagacttggagaaagagagggatttctacttcggaaagctacggaacattgaattgatttgccaggagaacgagggggaaaacgaccctgtattgcagaggattgtagacattctgtatgccacagatgaaggctttgtgatacctgatgaagggggcccacaggaggagcaagaagagtatggcgccgattacaaggacgatgatgacaagggagcaccaggaagtgctggttctgctgctggtagtggagcgtgcccggtgccgctgcagctgccgccgctggaacgcctgaccctggatgacaaaaaaccgctgaataccctgatctctgctactggtctgtggatgagtcgtaccggaaccattcataaaatcaaacaccacgaggttagccgttcgaaaatctatattgagatggcgtgtggcgatcatctggttgtgaacaatagccgctcttctcgtacagcacgtgcactgcgtcaccacaaatatcgtaaaacctgtaaacgttgccgtgtgtccgatgaggatctgaacaaattcctgacaaaagccaatgaggaccaaacaagcgtgaaagtgaaagtcgttagcgctcctacccgtactaaaaaagcaatgccgaaatccgttgctcgtgcccctaaaccactggaaaacactgaagcagcacaggcacagccgtctggaagcaaattctctccggccattcctgtttctacccaggagtccgtttctgttccagcaagtgtgagcaccagcattagcagtattagcaccggtgccaccgctagcgccctggttaaaggcaataccaatccgattacaagcatgtctgccccggttcaagcatcagctccagcactgacaaaatcccaaaccgatcgtctggaggttctgctgaatccgaaagacgaaatcagcctgaattccggcaaaccgtttcgtgaactggagagcgaactgctgtcacgtcgtaaaaaagacctgcaacaaatctatgccgaagaacgtgagaactatctggggaaactggaacgtgaaatcacccgctttttcgtggatcgtggctttctggagatcaaatccccgattctgattcctctggagtatatcgagcgtatgggcatcgacaatgataccgaactgagcaaacaaattttccgtgtggataaaaacttctgtctgcgccctatgctggcaccaaatctgtataactatctgcgcaaactggaccgtgccctgcctgatcctatcaaaatcttcgagatcggcccgtgttatcgtaaagagtccgacggtaaagaacatctggaggagtttaccatgctggcctttgcccaaatgggttcaggttgtactcgtgagaacctggaaagcatcatcaccgattttctgaaccacctgggcattgacttcaaaattgtgggcgacagctgtatggtgtatggcgacaccctggatgtcatgcacggcgacctggaactgtctagtgccgttgttggaccaattccgctggaccgtgagtggggtatcgacaaaccgtggatcggagcaggattcggtctggaacgcctgctgaaagtgaaacacgacttcaaaaacatcaaacgtgccgcccgttctgaatcgtattataacgggatctctacgaacctgtaa

SEQ ID NO: 406 - protein, 761 aa, Artificial Sequence
  Description of Artificial Sequence: Synthetic polypeptide
  EB1::PylRS(AA)
MAVNVYSTSVTSDNLSRHDMLAWINESLQLNLTKIEQLCSGAAYCQFMDMLFPGSIALKKVKFQAKLEHEYIQNFKILQAGFKRMGVDKIIPVDKLVKGKFQDNFEFVQWFKKFFDANYDGKDYDPVAARQGQETAVAPSLVAPALNKPKKPLTSSSAAPQRPISTQRTAAAPKAGPGVVRKNPGVGNGDDEAAELMQQVNVLKLTVEDLEKERDFYFGKLRNIELICQENEGENDPVLQRIVDILYATDEGFVIPDEGGPQEEQEEYGADYKDDDDKGAPGSAGSAAGSGACPVPLQLPPLERLTLDDKKPLNTLISATGLWMSRTGTIHKIKHHEVSRSKIYIEMACGDHLVVNNSRSSRTARALRHHKYRKTCKRCRVSDEDLNKFLTKANEDQTSVKVKVVSAPTRTKKAMPKSVARAPKPLENTEAAQAQPSGSKFSPAIPVSTQESVSVPASVSTSISSISTGATASALVKGNTNPITSMSAPVQASAPALTKSQTDRLEVLLNPKDEISLNSGKPFRELESELLSRRKKDLQQIYAEERENYLGKLEREITRFFVDRGFLEIKSPILIPLEYIERMGIDNDTELSKQIFRVDKNFCLRPMLAPNLYNYLRKLDRALPDPIKIFEIGPCYRKESDGKEHLEEFTMLAFAQMGSGCTRENLESIITDFLNHLGIDFKIVGDSCMVYGDTLDVMHGDLELSSAVVGPIPLDREWGIDKPWIGAGFGLERLLKVKHDFKNIKRAARSESYYNGISTNL

SEQ ID NO: 407 - DNA, 2286 bp, Artificial Sequence
  Description of Artificial Sequence: Synthetic polynucleotide
  EB1::PylRS(AAAF)
atggcagtgaacgtatactcaacgtcagtgaccagtgataacctaagtcgacatgacatgctggcctggatcaatgagtctctgcagttgaatctgacaaagatcgaacagttgtgctcaggggctgcgtattgtcagtttatggacatgctgttccctggctccattgccttgaagaaagtgaaattccaagctaagctagaacacgagtacatccagaacttcaaaatactacaagcaggttttaagagaatgggtgttgacaaaataattcctgtggacaaattagtaaaaggaaagtttcaggacaattttgaattcgttcagtggttcaagaagtttttcgatgcaaactatgatggaaaagactatgaccctgtggctgccagacaaggtcaagaaactgcagtggctccttcccttgttgctccagctctgaataaaccgaagaaacctctcacttctagcagtgcagctccccagaggcccatctcaacacagagaaccgctgcggctcctaaggctggccctggtgtggtgcgaaagaaccctggtgtgggcaacggagatgacgaggcagctgagttgatgcagcaggtcaacgtattgaaacttactgttgaagacttggagaaagagagggatttctacttcggaaagctacggaacattgaattgatttgccaggagaacgagggggaaaacgaccctgtattgcagaggattgtagacattctgtatgccacagatgaaggctttgtgatacctgatgaagggggcccacaggaggagcaagaagagtatggcgccgattacaaggacgatgatgacaagggagcaccaggaagtgctggttctgctgctggtagtggagcgtgcccggtgccgctgcagctgccgccgctggaacgcctgaccctggatgataaaaaaccgctgaataccctgatctctgctactggtctgtggatgagtcgtaccggaaccattcataaaatcaaacaccacgaggttagccgttcgaaaatctatattgagatggcgtgtggcgatcatctggttgtgaacaatagccgctcttctcgtacagcacgtgcactgcgtcaccacaaatatcgtaaaacctgtaaacgttgccgtgtgtccgatgaggatctgaacaaattcctgacaaaagccaatgaggaccaaacaagcgtgaaagtgaaagtcgttagcgctcctacccgtactaaaaaagcaatgccgaaatccgttgctcgtgcccctaaaccactggaaaacactgaagcagcacaggcacagccgtctggaagcaaattctctccggccattcctgtttctacccaggagtccgtttctgttccagcaagtgtgagcaccagcattagcagtattagcaccggtgccaccgctagcgccctggttaaaggcaataccaatccgattacaagcatgtctgccccggttcaagcatcagctccagcactgacaaaatcccaaaccgatcgtctggaggttctgctgaatccgaaagacgaaatcagcctgaattccggcaaaccgtttcgtgaactggagagcgaactgctgtcacgtcgtaaaaaagacctgcaacaaatctatgccgaagaacgtgagaactatctggggaaactggaacgtgaaatcacccgctttttcgtggatcgtggctttctggagatcaaatccccgattctgattcctctggagtatatcgagcgtatgggcatcgacaatgataccgaactgagcaaacaaattttccgtgtggataaaaacttctgtctgcgccctatgctagcaccaaatctggctaactatctgcgcaaactggaccgtgccctgcctgatcctatcaaaatcttcgagatcggcccgtgttatcgtaaagagtccgacggtaaagaacatctggaggagtttaccatgctggcctttgcccaaatgggttcaggttgtactcgtgagaacctggaaagcatcatcaccgattttctgaaccacctgggcattgacttcaaaattgtgggcgacagctgtatggtgtttggcgacaccctggatgtcatgcacggcgacctggaactgtctagtgccgttgtgggcccaatcccgctggatcgtgagtggggtatcgacaaaccttggatcggtgcgggttttggtctggagcgtctgctgaaagtaaaacacgacttcaagaacatcaaacgtgctgcacgttccgagtcctattacaatggtatttctactaacctgtaa

SEQ ID NO: 408 - protein, 761 aa, Artificial Sequence
  Description of Artificial Sequence: Synthetic polypeptide
  EB1::PylRS(AAAF)
MAVNVYSTSVTSDNLSRHDMLAWINESLQLNLTKIEQLCSGAAYCQFMDMLFPGSIALKKVKFQAKLEHEYIQNFKILQAGFKRMGVDKIIPVDKLVKGKFQDNFEFVQWFKKFFDANYDGKDYDPVAARQGQETAVAPSLVAPALNKPKKPLTSSSAAPQRPISTQRTAAAPKAGPGVVRKNPGVGNGDDEAAELMQQVNVLKLTVEDLEKERDFYFGKLRNIELICQENEGENDPVLQRIVDILYATDEGFVIPDEGGPQEEQEEYGADYKDDDDKGAPGSAGSAAGSGACPVPLQLPPLERLTLDDKKPLNTLISATGLWMSRTGTIHKIKHHEVSRSKIYIEMACGDHLVVNNSRSSRTARALRHHKYRKTCKRCRVSDEDLNKFLTKANEDQTSVKVKVVSAPTRTKKAMPKSVARAPKPLENTEAAQAQPSGSKFSPAIPVSTQESVSVPASVSTSISSISTGATASALVKGNTNPITSMSAPVQASAPALTKSQTDRLEVLLNPKDEISLNSGKPFRELESELLSRRKKDLQQIYAEERENYLGKLEREITRFFVDRGFLEIKSPILIPLEYIERMGIDNDTELSKQIFRVDKNFCLRPMLAPNLANYLRKLDRALPDPIKIFEIGPCYRKESDGKEHLEEFTMLAFAQMGSGCTRENLESIITDFLNHLGIDFKIVGDSCMVFGDTLDVMHGDLELSSAVVGPIPLDREWGIDKPWIGAGFGLERLLKVKHDFKNIKRAARSESYYNGISTNL

SEQ ID NO: 409 - DNA, 3768 bp, Artificial Sequence
  Description of Artificial Sequence: Synthetic polynucleotide
  EB1::FUS::PylRS(AA)
atggcagtgaacgtatactcaacgtcagtgaccagtgataacctaagtcgacatgacatgctggcctggatcaatgagtctctgcagttgaatctgacaaagatcgaacagttgtgctcaggggctgcgtattgtcagtttatggacatgctgttccctggctccattgccttgaagaaagtgaaattccaagctaagctagaacacgagtacatccagaacttcaaaatactacaagcaggttttaagagaatgggtgttgacaaaataattcctgtggacaaattagtaaaaggaaagtttcaggacaattttgaattcgttcagtggttcaagaagtttttcgatgcaaactatgatggaaaagactatgaccctgtggctgccagacaaggtcaagaaactgcagtggctccttcccttgttgctccagctctgaataaaccgaagaaacctctcacttctagcagtgcagctccccagaggcccatctcaacacagagaaccgctgcggctcctaaggctggccctggtgtggtgcgaaagaaccctggtgtgggcaacggagatgacgaggcagctgagttgatgcagcaggtcaacgtattgaaacttactgttgaagacttggagaaagagagggatttctacttcggaaagctacggaacattgaattgatttgccaggagaacgagggggaaaacgaccctgtattgcagaggattgtagacattctgtatgccacagatgaaggctttgtgatacctgatgaagggggcccacaggaggagcaagaagagtatggagcacccggctccgccggctccgccgccggctccggcatggcctcaaacgattatacccaacaagcaacccaaagctatggggcctaccccacccagcccgggcagggctattcccagcagagcagtcagccctacggacagcagagttacagtggttatagccagtccacggacacttcaggatatggccagagcagctattcttcttatggccagagccagaacacaggctatggaactcagtcaactccccagggatatggctcgactggcggctatggcagtagccagagctcccaatcgtcttacgggcagcagtcctcctaccctggctatggccagcagccagctcccagcagcacctcgggaagttacggtagcagttctcagagcagcagctatgggcagccccagagtgggagctacagccagcagcctagctatggtggacagcagcaaagctatggacagcagcaaagctataatccccctcagggctatggacagcagaaccagtacaacagcagcagtggtggtggaggtggaggtggaggtggaggtaactatggccaagatcaatcctccatgagtagtggtggtggcagtggtggcggttatggcaatcaagaccagagtggtggaggtggcagcggtggctatggacagcaggaccgtggaggccgcggcaggggtggcagtggtggcggcggcggcggcggcggtggtggttacaaccgcagcagtggtggctatgaacccagaggtcgtggaggtggccgtggaggcagaggtggcatgggcggaagtgaccgtggtggcttcaataaatttggtggccctcgggaccaaggatcacgtcatgactccgaacaggataattcagacaacaacaccatctttgtgcaaggcctgggtgagaatgttacaattgagtctgtggctgattacttcaagcagattggtattattaagacaaacaagaaaacgggacagcccatgattaatttgtacacagacagggaaactggcaagctgaagggagaggcaacggtctcttttgatgacccaccttcagctaaagcagctattgactggtttgatggtaaagaattctccggaaatcctatcaaggtctcatttgctactcgccgggcagactttaatcggggtggtggcaatggtcgtggaggccgagggcgaggaggacccatgggccgtggaggctatggaggtggtggcagtggtggtggtggccgaggaggatttcccagtggaggtggtggcggtggaggacagcagcgagctggtgactggaagtgtcctaatcccacctgtgagaatatgaacttctcttggaggaatgaatgcaaccagtgtaaggcccctaaaccagatggcccaggagggggaccaggtggctctcacatggggggtaactacggggatgatcgtcgtggtggcagaggtggtgcgatcgcaggcgccgattacaaggacgatgatgacaagggagcaccaggaagtgctggttctgctgctggtagtggagcgtgcccggtgccgctgcagctgccgccgctggaacgcctgaccctggatgacaaaaaaccgctgaataccctgatctctgctactggtctgtggatgagtcgtaccggaaccattcataaaatcaaacaccacgaggttagccgttcgaaaatctatattgagatggcgtgtggcgatcatctggttgtgaacaatagccgctcttctcgtacagcacgtgcactgcgtcaccacaaatatcgtaaaacctgtaaacgttgccgtgtgtccgatgaggatctgaacaaattcctgacaaaagccaatgaggaccaaacaagcgtgaaagtgaaagtcgttagcgctcctacccgtactaaaaaagcaatgccgaaatccgttgctcgtgcccctaaaccactggaaaacactgaagcagcacaggcacagccgtctggaagcaaattctctccggccattcctgtttctacccaggagtccgtttctgttccagcaagtgtgagcaccagcattagcagtattagcaccggtgccaccgctagcgccctggttaaaggcaataccaatccgattacaagcatgtctgccccggttcaagcatcagctccagcactgacaaaatcccaaaccgatcgtctggaggttctgctgaatccgaaagacgaaatcagcctgaattccggcaaaccgtttcgtgaactggagagcgaactgctgtcacgtcgtaaaaaagacctgcaacaaatctatgccgaagaacgtgagaactatctggggaaactggaacgtgaaatcacccgctttttcgtggatcgtggctttctggagatcaaatccccgattctgattcctctggagtatatcgagcgtatgggcatcgacaatgataccgaactgagcaaacaaattttccgtgtggataaaaacttctgtctgcgccctatgctggcaccaaatctgtataactatctgcgcaaactggaccgtgccctgcctgatcctatcaaaatcttcgagatcggcccgtgttatcgtaaagagtccgacggtaaagaacatctggaggagtttaccatgctggcctttgcccaaatgggttcaggttgtactcgtgagaacctggaaagcatcatcaccgattttctgaaccacctgggcattgacttcaaaattgtgggcgacagctgtatggtgtatggcgacaccctggatgtcatgcacggcgacctggaactgtctagtgccgttgttggaccaattccgctggaccgtgagtggggtatcgacaaaccgtggatcggagcaggattcggtctggaacgcctgctgaaagtgaaacacgacttcaaaaacatcaaacgtgccgcccgttctgaatcgtattataacgggatctctacgaacctgtaa

SEQ ID NO: 410 - protein, 1255 aa, Artificial Sequence
  Description of Artificial Sequence: Synthetic polypeptide
  EB1::FUS::PylRS(AA)
MAVNVYSTSVTSDNLSRHDMLAWINESLQLNLTKIEQLCSGAAYCQFMDMLFPGSIALKKVKFQAKLEHEYIQNFKILQAGFKRMGVDKIIPVDKLVKGKFQDNFEFVQWFKKFFDANYDGKDYDPVAARQGQETAVAPSLVAPALNKPKKPLTSSSAAPQRPISTQRTAAAPKAGPGVVRKNPGVGNGDDEAAELMQQVNVLKLTVEDLEKERDFYFGKLRNIELICQENEGENDPVLQRIVDILYATDEGFVIPDEGGPQEEQEEYGAPGSAGSAAGSGMASNDYTQQATQSYGAYPTQPGQGYSQQSSQPYGQQSYSGYSQSTDTSGYGQSSYSSYGQSQNTGYGTQSTPQGYGSTGGYGSSQSSQSSYGQQSSYPGYGQQPAPSSTSGSYGSSSQSSSYGQPQSGSYSQQPSYGGQQQSYGQQQSYNPPQGYGQQNQYNSSSGGGGGGGGGGNYGQDQSSMSSGGGSGGGYGNQDQSGGGGSGGYGQQDRGGRGRGGSGGGGGGGGGGYNRSSGGYEPRGRGGGRGGRGGMGGSDRGGFNKFGGPRDQGSRHDSEQDNSDNNTIFVQGLGENVTIESVADYFKQIGIIKTNKKTGQPMINLYTDRETGKLKGEATVSFDDPPSAKAAIDWFDGKEFSGNPIKVSFATRRADFNRGGGNGRGGRGRGGPMGRGGYGGGGSGGGGRGGFPSGGGGGGGQQRAGDWKCPNPTCENMNFSWRNECNQCKAPKPDGPGGGPGGSHMGGNYGDDRRGGRGGAIAGADYKDDDDKGAPGSAGSAAGSGACPVPLQLPPLERLTLDDKKPLNTLISATGLWMSRTGTIHKIKHHEVSRSKIYIEMACGDHLVVNNSRSSRTARALRHHKYRKTCKRCRVSDEDLNKFLTKANEDQTSVKVKVVSAPTRTKKAMPKSVARAPKPLENTEAAQAQPSGSKFSPAIPVSTQESVSVPASVSTSISSISTGATASALVKGNTNPITSMSAPVQASAPALTKSQTDRLEVLLNPKDEISLNSGKPFRELESELLSRRKKDLQQIYAEERENYLGKLEREITRFFVDRGFLEIKSPILIPLEYIERMGIDNDTELSKQIFRVDKNFCLRPMLAPNLYNYLRKLDRALPDPIKIFEIGPCYRKESDGKEHLEEFTMLAFAQMGSGCTRENLESIITDFLNHLGIDFKIVGDSCMVYGDTLDVMHGDLELSSAVVGPIPLDREWGIDKPWIGAGFGLERLLKVKHDFKNIKRAARSESYYNGISTNL

SEQ ID NO: 411 - DNA, 3768 bp, Artificial Sequence
  Description of Artificial Sequence: Synthetic polynucleotide
  EB1::FUS::PylRS(AAAF)
atggcagtgaacgtatactcaacgtcagtgaccagtgataacctaagtcgacatgacatgctggcctggatcaatgagtctctgcagttgaatctgacaaagatcgaacagttgtgctcaggggctgcgtattgtcagtttatggacatgctgttccctggctccattgccttgaagaaagtgaaattccaagctaagctagaacacgagtacatccagaacttcaaaatactacaagcaggttttaagagaatgggtgttgacaaaataattcctgtggacaaattagtaaaaggaaagtttcaggacaattttgaattcgttcagtggttcaagaagtttttcgatgcaaactatgatggaaaagactatgaccctgtggctgccagacaaggtcaagaaactgcagtggctccttcccttgttgctccagctctgaataaaccgaagaaacctctcacttctagcagtgcagctccccagaggcccatctcaacacagagaaccgctgcggctcctaaggctggccctggtgtggtgcgaaagaaccctggtgtgggcaacggagatgacgaggcagctgagttgatgcagcaggtcaacgtattgaaacttactgttgaagacttggagaaagagagggatttctacttcggaaagctacggaacattgaattgatttgccaggagaacgagggggaaaacgaccctgtattgcagaggattgtagacattctgtatgccacagatgaaggctttgtgatacctgatgaagggggcccacaggaggagcaagaagagtatggagcacccggctccgccggctccgccgccggctccggcatggcctcaaacgattatacccaacaagcaacccaaagctatggggcctaccccacccagcccgggcagggctattcccagcagagcagtcagccctacggacagcagagttacagtggttatagccagtccacggacacttcaggatatggccagagcagctattcttcttatggccagagccagaacacaggctatggaactcagtcaactccccagggatatggctcgactggcggctatggcagtagccagagctcccaatcgtcttacgggcagcagtcctcctaccctggctatggccagcagccagctcccagcagcacctcgggaagttacggtagcagttctcagagcagcagctatgggcagccccagagtgggagctacagccagcagcctagctatggtggacagcagcaaagctatggacagcagcaaagctataatccccctcagggctatggacagcagaaccagtacaacagcagcagtggtggtggaggtggaggtggaggtggaggtaactatggccaagatcaatcctccatgagtagtggtggtggcagtggtggcggttatggcaatcaagaccagagtggtggaggtggcagcggtggctatggacagcaggaccgtggaggccgcggcaggggtggcagtggtggcggcggcggcggcggcggtggtggttacaaccgcagcagtggtggctatgaacccagaggtcgtggaggtggccgtggaggcagaggtggcatgggcggaagtgaccgtggtggcttcaataaatttggtggccctcgggaccaaggatcacgtcatgactccgaacaggataattcagacaacaacaccatctttgtgcaaggcctgggtgagaatgttacaattgagtctgtggctgattacttcaagcagattggtattattaagacaaacaagaaaacgggacagcccatgattaatttgtacacagacagggaaactggcaagctgaagggagaggcaacggtctcttttgatgacccaccttcagctaaagcagctattgactggtttgatggtaaagaattctccggaaatcctatcaaggtctcatttgctactcgccgggcagactttaatcggggtggtggcaatggtcgtggaggccgagggcgaggaggacccatgggccgtggaggctatggaggtggtggcagtggtggtggtggccgaggaggatttcccagtggaggtggtggcggtggaggacagcagcgagctggtgactggaagtgtcctaatcccacctgtgagaatatgaacttctcttggaggaatgaatgcaaccagtgtaaggcccctaaaccagatggcccaggagggggaccaggtggctctcacatggggggtaactacggggatgatcgtcgtggtggcagaggtggtgcgatcgcaggcgccgattacaaggacgatgatgacaagggagcaccaggaagtgctggttctgctgctggtagtggagcgtgcccggtgccgctgcagctgccgccgctggaacgcctgaccctggatgataaaaaaccgctgaataccctgatctctgctactggtctgtggatgagtcgtaccggaaccattcataaaatcaaacaccacgaggttagccgttcgaaaatctatattgagatggcgtgtggcgatcatctggttgtgaacaatagccgctcttctcgtacagcacgtgcactgcgtcaccacaaatatcgtaaaacctgtaaacgttgccgtgtgtccgatgaggatctgaacaaattcctgacaaaagccaatgaggaccaaacaagcgtgaaagtgaaagtcgttagcgctcctacccgtactaaaaaagcaatgccgaaatccgttgctcgtgcccctaaaccactggaaaacactgaagcagcacaggcacagccgtctggaagcaaattctctccggccattcctgtttctacccaggagtccgtttctgttccagcaagtgtgagcaccagcattagcagtattagcaccggtgccaccgctagcgccctggttaaaggcaataccaatccgattacaagcatgtctgccccggttcaagcatcagctccagcactgacaaaatcccaaaccgatcgtctggaggttctgctgaatccgaaagacgaaatcagcctgaattccggcaaaccgtttcgtgaactggagagcgaactgctgtcacgtcgtaaaaaagacctgcaacaaatctatgccgaagaacgtgagaactatctggggaaactggaacgtgaaatcacccgctttttcgtggatcgtggctttctggagatcaaatccccgattctgattcctctggagtatatcgagcgtatgggcatcgacaatgataccgaactgagcaaacaaattttccgtgtggataaaaacttctgtctgcgccctatgctagcaccaaatctggctaactatctgcgcaaactggaccgtgccctgcctgatcctatcaaaatcttcgagatcggcccgtgttatcgtaaagagtccgacggtaaagaacatctggaggagtttaccatgctggcctttgcccaaatgggttcaggttgtactcgtgagaacctggaaagcatcatcaccgattttctgaaccacctgggcattgacttcaaaattgtgggcgacagctgtatggtgtttggcgacaccctggatgtcatgcacggcgacctggaactgtctagtgccgttgtgggcccaatcccgctggatcgtgagtggggtatcgacaaaccttggatcggtgcgggttttggtctggagcgtctgctgaaagtaaaacacgacttcaagaacatcaaacgtgctgcacgttccgagtcctattacaatggtatttctactaacctgtaa

SEQ ID NO: 412 - protein, 1255 aa, Artificial Sequence
  Description of Artificial Sequence: Synthetic polypeptide
  EB1::FUS::PylRS(AAAF)
MAVNVYSTSVTSDNLSRHDMLAWINESLQLNLTKIEQLCSGAAYCQFMDMLFPGSIALKKVKFQAKLEHEYIQNFKILQAGFKRMGVDKIIPVDKLVKGKFQDNFEFVQWFKKFFDANYDGKDYDPVAARQGQETAVAPSLVAPALNKPKKPLTSSSAAPQRPISTQRTAAAPKAGPGVVRKNPGVGNGDDEAAELMQQVNVLKLTVEDLEKERDFYFGKLRNIELICQENEGENDPVLQRIVDILYATDEGFVIPDEGGPQEEQEEYGAPGSAGSAAGSGMASNDYTQQATQSYGAYPTQPGQGYSQQSSQPYGQQSYSGYSQSTDTSGYGQSSYSSYGQSQNTGYGTQSTPQGYGSTGGYGSSQSSQSSYGQQSSYPGYGQQPAPSSTSGSYGSSSQSSSYGQPQSGSYSQQPSYGGQQQSYGQQQSYNPPQGYGQQNQYNSSSGGGGGGGGGGNYGQDQSSMSSGGGSGGGYGNQDQSGGGGSGGYGQQDRGGRGRGGSGGGGGGGGGGYNRSSGGYEPRGRGGGRGGRGGMGGSDRGGFNKFGGPRDQGSRHDSEQDNSDNNTIFVQGLGENVTIESVADYFKQIGIIKTNKKTGQPMINLYTDRETGKLKGEATVSFDDPPSAKAAIDWFDGKEFSGNPIKVSFATRRADFNRGGGNGRGGRGRGGPMGRGGYGGGGSGGGGRGGFPSGGGGGGGQQRAGDWKCPNPTCENMNFSWRNECNQCKAPKPDGPGGGPGGSHMGGNYGDDRRGGRGGAIAGADYKDDDDKGAPGSAGSAAGSGACPVPLQLPPLERLTLDDKKPLNTLISATGLWMSRTGTIHKIKHHEVSRSKIYIEMACGDHLVVNNSRSSRTARALRHHKYRKTCKRCRVSDEDLNKFLTKANEDQTSVKVKVVSAPTRTKKAMPKSVARAPKPLENTEAAQAQPSGSKFSPAIPVSTQESVSVPASVSTSISSISTGATASALVKGNTNPITSMSAPVQASAPALTKSQTDRLEVLLNPKDEISLNSGKPFRELESELLSRRKKDLQQIYAEERENYLGKLEREITRFFVDRGFLEIKSPILIPLEYIERMGIDNDTELSKQIFRVDKNFCLRPMLAPNLANYLRKLDRALPDPIKIFEIGPCYRKESDGKEHLEEFTMLAFAQMGSGCTRENLESIITDFLNHLGIDFKIVGDSCMVFGDTLDVMHGDLELSSAVVGPIPLDREWGIDKPWIGAGFGLERLLKVKHDFKNIKRAARSESYYNGISTNL

SEQ ID NO: 413 - DNA, 1230 bp, Artificial Sequence
  Description of Artificial Sequence: Synthetic polynucleotide
  EB1::MCP
atggcagtgaacgtatactcaacgtcagtgaccagtgataacctaagtcgacatgacatgctggcctggatcaatgagtctctgcagttgaatctgacaaagatcgaacagttgtgctcaggggctgcgtattgtcagtttatggacatgctgttccctggctccattgccttgaagaaagtgaaattccaagctaagctagaacacgagtacatccagaacttcaaaatactacaagcaggttttaagagaatgggtgttgacaaaataattcctgtggacaaattagtaaaaggaaagtttcaggacaattttgaattcgttcagtggttcaagaagtttttcgatgcaaactatgatggaaaagactatgaccctgtggctgccagacaaggtcaagaaactgcagtggctccttcccttgttgctccagctctgaataaaccgaagaaacctctcacttctagcagtgcagctccccagaggcccatctcaacacagagaaccgctgcggctcctaaggctggccctggtgtggtgcgaaagaaccctggtgtgggcaacggagatgacgaggcagctgagttgatgcagcaggtcaacgtattgaaacttactgttgaagacttggagaaagagagggatttctacttcggaaagctacggaacattgaattgatttgccaggagaacgagggggaaaacgaccctgtattgcagaggattgtagacattctgtatgccacagatgaaggctttgtgatacctgatgaagggggcccacaggaggagcaagaagagtatgcgatcgcatatccctatgatgtgccggattatgctggagcaccaggaagtgctggttctgctgctggtagtggagcttctaactttactcagttcgttctcgtcgacaatggcggaactggcgacgtgactgtcgccccaagcaacttcgctaacgggatcgctgaatggatcagctctaactcgcgttcacaggcttacaaagtaacctgtagcgttcgtcagagctctgcgcagaatcgcaaatacaccatcaaagtcgaggtgcctaaaggcgcctggcgttcgtacttaaatatggaactaaccattccaattttcgccacgaattccgactgcgagcttattgttaaggcaatgcaaggtctcctaaaagatggaaacccgattccctcagcaatcgcagcaaactccggcatctactaa

SEQ ID NO: 414 - protein, 409 aa, Artificial Sequence
  Description of Artificial Sequence: Synthetic polypeptide
  EB1::MCP
MAVNVYSTSVTSDNLSRHDMLAWINESLQLNLTKIEQLCSGAAYCQFMDMLFPGSIALKKVKFQAKLEHEYIQNFKILQAGFKRMGVDKIIPVDKLVKGKFQDNFEFVQWFKKFFDANYDGKDYDPVAARQGQETAVAPSLVAPALNKPKKPLTSSSAAPQRPISTQRTAAAPKAGPGVVRKNPGVGNGDDEAAELMQQVNVLKLTVEDLEKERDFYFGKLRNIELICQENEGENDPVLQRIVDILYATDEGFVIPDEGGPQEEQEEYAIAYPYDVPDYAGAPGSAGSAAGSGASNFTQFVLVDNGGTGDVTVAPSNFANGIAEWISSNSRSQAYKVTCSVRQSSAQNRKYTIKVEVPKGAWRSYLNMELTIPIFATNSDCELIVKAMQGLLKDGNPIPSAIAANSGIY

SEQ ID NO: 415 - DNA, 3114 bp, Artificial Sequence
  Description of Artificial Sequence: Synthetic polynucleotide
  EB1::EWSR1::MCP
atggcagtgaacgtatactcaacgtcagtgaccagtgataacctaagtcgacatgacatgctggcctggatcaatgagtctctgcagttgaatctgacaaagatcgaacagttgtgctcaggggctgcgtattgtcagtttatggacatgctgttccctggctccattgccttgaagaaagtgaaattccaagctaagctagaacacgagtacatccagaacttcaaaatactacaagcaggttttaagagaatgggtgttgacaaaataattcctgtggacaaattagtaaaaggaaagtttcaggacaattttgaattcgttcagtggttcaagaagtttttcgatgcaaactatgatggaaaagactatgaccctgtggctgccagacaaggtcaagaaactgcagtggctccttcccttgttgctccagctctgaataaaccgaagaaacctctcacttctagcagtgcagctccccagaggcccatctcaacacagagaaccgctgcggctcctaaggctggccctggtgtggtgcgaaagaaccctggtgtgggcaacggagatgacgaggcagctgagttgatgcagcaggtcaacgtattgaaacttactgttgaagacttggagaaagagagggatttctacttcggaaagctacggaacattgaattgatttgccaggagaacgagggggaaaacgaccctgtattgcagaggattgtagacattctgtatgccacagatgaaggctttgtgatacctgatgaagggggcccacaggaggagcaagaagagtatatggcgtccacggattacagtacctatagccaagctgcagcgcagcagggctacagtgcttacaccgcccagcccactcaaggatatgcacagaccacccaggcatatgggcaacaaagctatggaacctatggacagcccactgatgtcagctatacccaggctcagaccactgcaacctatgggcagaccgcctatgcaacttcttatggacagcctcccactggttatactactccaactgccccccaggcatacagccagcctgtccaggggtatggcactggtgcttatgataccaccactgctacagtcaccaccacccaggcctcctatgcagctcagtctgcatatggcactcagcctgcttatccagcctatgggcagcagccagcagccactgcacctacaagaccgcaggatggaaacaagcccactgagactagtcaacctcaatctagcacagggggttacaaccagcccagcctaggatatggacagagtaactacagttatccccaggtacctgggagctaccccatgcagccagtcactgcacctccatcctaccctcctaccagctattcctctacacagccgactagttatgatcagagcagttactctcagcagaacacctatgggcaaccgagcagctatggacagcagagtagctatggtcaacaaagcagctatgggcagcagcctcccactagttacccaccccaaactggatcctacagccaagctccaagtcaatatagccaacagagcagcagctacgggcagcagagttcattccgacaggaccaccccagtagcatgggtgtttatgggcaggagtctggaggattttccggaccaggagagaaccggagcatgagtggccctgataaccggggcaggggaagagggggatttgatcgtggaggcatgagcagaggtgggcggggaggaggacgcggtggaatgggcagcgctggagagcgaggtggcttcaataagcctggtggacccatggatgaaggaccagatcttgatctaggcccacctgtagatccagatgaagactctgacaacagtgcaatttatgtacaaggattaaatgacagtgtgactctagatgatctggcagacttctttaagcagtgtggggttgttaagatgaacaagagaactgggcaacccatgatccacatctacctggacaaggaaacaggaaagcccaaaggcgatgccacagtgtcctatgaagacccacctactgccaaggctgccgtggaatggtttgatgggaaagattttcaagggagcaaacttaaagtctcccttgctcggaagaagcctccaatgaacagtatgcggggtggtctgccaccccgtgagggcagaggcatgccaccaccactccgtggaggtccaggaggcccaggaggtcctgggggacccatgggtcgcatgggaggccgtggaggagatagaggaggcttccctccaagaggaccccggggttcccgagggaacccctctggaggaggaaacgtccagcaccgagctggagactggcagtgtcccaatccgggttgtggaaaccagaacttcgcctggagaacagagtgcaaccagtgtaaggccccaaagcctgaaggcttcctcccgccaccctttccgcccccgggtggtgatcgtggcagaggtggccctggtggcatgcggggaggaagaggtggcctcatggatcgtggtggtcccggtggaatgttcagaggtggccgtggtggagacagaggtggcttccgtggtggccggggcatggaccgaggtggctttggtggaggaagacgaggtggccctggggggccccctggacctttgatggaacaggcgatcgcatatccctatgatgtgccggattatgctggagcaccaggaagtgctggttctgctgctggtagtggagcttctaactttactcagttcgttctcgtcgacaatggcggaactggcgacgtgactgtcgccccaagcaacttcgctaacgggatcgctgaatggatcagctctaactcgcgttcacaggcttacaaagtaacctgtagcgttcgtcagagctctgcgcagaatcgcaaatacaccatcaaagtcgaggtgcctaaaggcgcctggcgttcgtacttaaatatggaactaaccattccaattttcgccacgaattccgactgcgagcttattgttaaggcaatgcaaggtctcctaaaagatggaaacccgattccctcagcaatcgcagcaaactccggcatctactaa

SEQ ID NO: 416 - protein, 1037 aa, Artificial Sequence
  Description of Artificial Sequence: Synthetic polypeptide
  EB1::EWSR1::MCP
MAVNVYSTSVTSDNLSRHDMLAWINESLQLNLTKIEQLCSGAAYCQFMDMLFPGSIALKKVKFQAKLEHEYIQNFKILQAGFKRMGVDKIIPVDKLVKGKFQDNFEFVQWFKKFFDANYDGKDYDPVAARQGQETAVAPSLVAPALNKPKKPLTSSSAAPQRPISTQRTAAAPKAGPGVVRKNPGVGNGDDEAAELMQQVNVLKLTVEDLEKERDFYFGKLRNIELICQENEGENDPVLQRIVDILYATDEGFVIPDEGGPQEEQEEYMASTDYSTYSQAAAQQGYSAYTAQPTQGYAQTTQAYGQQSYGTYGQPTDVSYTQAQTTATYGQTAYATSYGQPPTGYTTPTAPQAYSQPVQGYGTGAYDTTTATVTTTQASYAAQSAYGTQPAYPAYGQQPAATAPTRPQDGNKPTETSQPQSSTGGYNQPSLGYGQSNYSYPQVPGSYPMQPVTAPPSYPPTSYSSTQPTSYDQSSYSQQNTYGQPSSYGQQSSYGQQSSYGQQPPTSYPPQTGSYSQAPSQYSQQSSSYGQQSSFRQDHPSSMGVYGQESGGFSGPGENRSMSGPDNRGRGRGGFDRGGMSRGGRGGGRGGMGSAGERGGFNKPGGPMDEGPDLDLGPPVDPDEDSDNSAIYVQGLNDSVTLDDLADFFKQCGVVKMNKRTGQPMIHIYLDKETGKPKGDATVSYEDPPTAKAAVEWFDGKDFQGSKLKVSLARKKPPMNSMRGGLPPREGRGMPPPLRGGPGGPGGPGGPMGRMGGRGGDRGGFPPRGPRGSRGNPSGGGNVQHRAGDWQCPNPGCGNQNFAWRTECNQCKAPKPEGFLPPPFPPPGGDRGRGGPGGMRGGRGGLMDRGGPGGMFRGGRGGDRGGFRGGRGMDRGGFGGGRRGGPGGPPGPLMEQAIAYPYDVPDYAGAPGSAGSAAGSGASNFTQFVLVDNGGTGDVTVAPSNFANGIAEWISSNSRSQAYKVTCSVRQSSAQNRKYTIKVEVPKGAWRSYLNMELTIPIFATNSDCELIVKAMQGLLKDGNPIPSAIAANSGIY

SEQ ID NO: 417 - DNA, 3258 bp, Artificial Sequence
  Description of Artificial Sequence: Synthetic polynucleotide
  EB1::EWSR1::4xlambdaN22
atggcagtgaacgtatactcaacgtcagtgaccagtgataacctaagtcgacatgacatgctggcctggatcaatgagtctctgcagttgaatctgacaaagatcgaacagttgtgctcaggggctgcgtattgtcagtttatggacatgctgttccctggctccattgccttgaagaaagtgaaattccaagctaagctagaacacgagtacatccagaacttcaaaatactacaagcaggttttaagagaatgggtgttgacaaaataattcctgtggacaaattagtaaaaggaaagtttcaggacaattttgaattcgttcagtggttcaagaagtttttcgatgcaaactatgatggaaaagactatgaccctgtggctgccagacaaggtcaagaaactgcagtggctccttcccttgttgctccagctctgaataaaccgaagaaacctctcacttctagcagtgcagctccccagaggcccatctcaacacagagaaccgctgcggctcctaaggctggccctggtgtggtgcgaaagaaccctggtgtgggcaacggagatgacgaggcagctgagttgatgcagcaggtcaacgtattgaaacttactgttgaagacttggagaaagagagggatttctacttcggaaagctacggaacattgaattgatttgccaggagaacgagggggaaaacgaccctgtattgcagaggattgtagacattctgtatgccacagatgaaggctttgtgatacctgatgaagggggcccacaggaggagcaagaagagtatatggcgtccacggattacagtacctatagccaagctgcagcgcagcagggctacagtgcttacaccgcccagcccactcaaggatatgcacagaccacccaggcatatgggcaacaaagctatggaacctatggacagcccactgatgtcagctatacccaggctcagaccactgcaacctatgggcagaccgcctatgcaacttcttatggacagcctcccactggttatactactccaactgccccccaggcatacagccagcctgtccaggggtatggcactggtgcttatgataccaccactgctacagtcaccaccacccaggcctcctatgcagctcagtctgcatatggcactcagcctgcttatccagcctatgggcagcagccagcagccactgcacctacaagaccgcaggatggaaacaagcccactgagactagtcaacctcaatctagcacagggggttacaaccagcccagcctaggatatggacagagtaactacagttatccccaggtacctgggagctaccccatgcagccagtcactgcacctccatcctaccctcctaccagctattcctctacacagccgactagttatgatcagagcagttactctcagcagaacacctatgggcaaccgagcagctatggacagcagagtagctatggtcaacaaagcagctatgggcagcagcctcccactagttacccaccccaaactggatcctacagccaagctccaagtcaatatagccaacagagcagcagctacgggcagcagagttcattccgacaggaccaccccagtagcatgggtgtttatgggcaggagtctggaggattttccggaccaggagagaaccggagcatgagtggccctgataaccggggcaggggaagagggggatttgatcgtggaggcatgagcagaggtgggcggggaggaggacgcggtggaatgggcagcgctggagagcgaggtggcttcaataagcctggtggacccatggatgaaggaccagatcttgatctaggcccacctgtagatccagatgaagactctgacaacagtgcaatttatgtacaaggattaaatgacagtgtgactctagatgatctggcagacttctttaagcagtgtggggttgttaagatgaacaagagaactgggcaacccatgatccacatctacctggacaaggaaacaggaaagcccaaaggcgatgccacagtgtcctatgaagacccacctactgccaaggctgccgtggaatggtttgatgggaaagattttcaagggagcaaacttaaagtctcccttgctcggaagaagcctccaatgaacagtatgcggggtggtctgccaccccgtgagggcagaggcatgccaccaccactccgtggaggtccaggaggcccaggaggtcctgggggacccatgggtcgcatgggaggccgtggaggagatagaggaggcttccctccaagaggaccccggggttcccgagggaacccctctggaggaggaaacgtccagcaccgagctggagactggcagtgtcccaatccgggttgtggaaaccagaacttcgcctggagaacagagtgcaaccagtgtaaggccccaaagcctgaaggcttcctcccgccaccctttccgcccccgggtggtgatcgtggcagaggtggccctggtggcatgcggggaggaagaggtggcctcatggatcgtggtggtcccggtggaatgttcagaggtggccgtggtggagacagaggtggcttccgtggtggccggggcatggaccgaggtggctttggtggaggaagacgaggtggccctggggggccccctggacctttgatggaacaggcgatcgcaggagcaccaggaagtgctggttctgctgctggtagtggagagcagaagctgatctcagaggaggacctgctagccaccatggacgcacaaacacgacgacgtgagcgtcgcgctgagaaacaagctcaatggaaagctgcaaacccaccgctcgacggagccggagctggcgctggagctggagccggagctggcggtctagccaccatggacgcacaaacacgacgacgtgagcgtcgcgctgagaaacaagctcaatggaaagctgcaaacccaccgctcgacggagccggagctggcgctggagctggagccggagctggcggtctagccaccatggacgcacaaacacgacgacgtgagcgtcgcgctgagaaacaagctcaatggaaagctgcaaacccaccgctcgacggagccggagctggcgctggagctggagccggagctggcggtctagccaccatggacgcacaaacacgacgacgtgagcgtcgcgctgagaaacaagctcaatggaaagctgcaaacccaccgctcgagtctagagggcccgtttaa

SEQ ID NO: 418 - protein, 1085 aa, Artificial Sequence
  Description of Artificial Sequence: Synthetic polypeptide
  EB1::EWSR1::4xlambdaN22
MAVNVYSTSVTSDNLSRHDMLAWINESLQLNLTKIEQLCSGAAYCQFMDMLFPGSIALKKVKFQAKLEHEYIQNFKILQAGFKRMGVDKIIPVDKLVKGKFQDNFEFVQWFKKFFDANYDGKDYDPVAARQGQETAVAPSLVAPALNKPKKPLTSSSAAPQRPISTQRTAAAPKAGPGVVRKNPGVGNGDDEAAELMQQVNVLKLTVEDLEKERDFYFGKLRNIELICQENEGENDPVLQRIVDILYATDEGFVIPDEGGPQEEQEEYMASTDYSTYSQAAAQQGYSAYTAQPTQGYAQTTQAYGQQSYGTYGQPTDVSYTQAQTTATYGQTAYATSYGQPPTGYTTPTAPQAYSQPVQGYGTGAYDTTTATVTTTQASYAAQSAYGTQPAYPAYGQQPAATAPTRPQDGNKPTETSQPQSSTGGYNQPSLGYGQSNYSYPQVPGSYPMQPVTAPPSYPPTSYSSTQPTSYDQSSYSQQNTYGQPSSYGQQSSYGQQSSYGQQPPTSYPPQTGSYSQAPSQYSQQSSSYGQQSSFRQDHPSSMGVYGQESGGFSGPGENRSMSGPDNRGRGRGGFDRGGMSRGGRGGGRGGMGSAGERGGFNKPGGPMDEGPDLDLGPPVDPDEDSDNSAIYVQGLNDSVTLDDLADFFKQCGVVKMNKRTGQPMIHIYLDKETGKPKGDATVSYEDPPTAKAAVEWFDGKDFQGSKLKVSLARKKPPMNSMRGGLPPREGRGMPPPLRGGPGGPGGPGGPMGRMGGRGGDRGGFPPRGPRGSRGNPSGGGNVQHRAGDWQCPNPGCGNQNFAWRTECNQCKAPKPEGFLPPPFPPPGGDRGRGGPGGMRGGRGGLMDRGGPGGMFRGGRGGDRGGFRGGRGMDRGGFGGGRRGGPGGPPGPLMEQAIAGAPGSAGSAAGSGEQKLISEEDLLATMDAQTRRRERRAEKQAQWKAANPPLDGAGAGAGAGAGAGGLATMDAQTRRRERRAEKQAQWKAANPPLDGAGAGAGAGAGAGGLATMDAQTRRRERRAEKQAQWKAANPPLDGAGAGAGAGAGAGGLATMDAQTRRRERRAEKQAQWKAANPPLESRGPV

SEQ ID NO: 419 - DNA, 3768 bp, Artificial Sequence
  Description of Artificial Sequence: Synthetic polynucleotide
  EB1::FUS::PylRS(AF)
atggcagtgaacgtatactcaacgtcagtgaccagtgataacctaagtcgacatgacatgctggcctggatcaatgagtctctgcagttgaatctgacaaagatcgaacagttgtgctcaggggctgcgtattgtcagtttatggacatgctgttccctggctccattgccttgaagaaagtgaaattccaagctaagctagaacacgagtacatccagaacttcaaaatactacaagcaggttttaagagaatgggtgttgacaaaataattcctgtggacaaattagtaaaaggaaagtttcaggacaattttgaattcgttcagtggttcaagaagtttttcgatgcaaactatgatggaaaagactatgaccctgtggctgccagacaaggtcaagaaactgcagtggctccttcccttgttgctccagctctgaataaaccgaagaaacctctcacttctagcagtgcagctccccagaggcccatctcaacacagagaaccgctgcggctcctaaggctggccctggtgtggtgcgaaagaaccctggtgtgggcaacggagatgacgaggcagctgagttgatgcagcaggtcaacgtattgaaacttactgttgaagacttggagaaagagagggatttctacttcggaaagctacggaacattgaattgatttgccaggagaacgagggggaaaacgaccctgtattgcagaggattgtagacattctgtatgccacagatgaaggctttgtgatacctgatgaagggggcccacaggaggagcaagaagagtatggagcacccggctccgccggctccgccgccggctccggcatggcctcaaacgattatacccaacaagcaacccaaagctatggggcctaccccacccagcccgggcagggctattcccagcagagcagtcagccctacggacagcagagttacagtggttatagccagtccacggacacttcaggatatggccagagcagctattcttcttatggccagagccagaacacaggctatggaactcagtcaactccccagggatatggctcgactggcggctatggcagtagccagagctcccaatcgtcttacgggcagcagtcctcctaccctggctatggccagcagccagctcccagcagcacctcgggaagttacggtagcagttctcagagcagcagctatgggcagccccagagtgggagctacagccagcagcctagctatggtggacagcagcaaagctatggacagcagcaaagctataatccccctcagggctatggacagcagaaccagtacaacagcagcagtggtggtggaggtggaggtggaggtggaggtaactatggccaagatcaatcctccatgagtagtggtggtggcagtggtggcggttatggcaatcaagaccagagtggtggaggtggcagcggtggctatggacagcaggaccgtggaggccgcggcaggggtggcagtggtggcggcggcggcggcggcggtggtggttacaaccgcagcagtggtggctatgaacccagaggtcgtggaggtggccgtggaggcagaggtggcatgggcggaagtgaccgtggtggcttcaataaatttggtggccctcgggaccaaggatcacgtcatgactccgaacaggataattcagacaacaacaccatctttgtgcaaggcctgggtgagaatgttacaattgagtctgtggctgattacttcaagcagattggtattattaagacaaacaagaaaacgggacagcccatgattaatttgtacacagacagggaaactggcaagctgaagggagaggcaacggtctcttttgatgacccaccttcagctaaagcagctattgactggtttgatggtaaagaattctccggaaatcctatcaaggtctcatttgctactcgccgggcagactttaatcggggtggtggcaatggtcgtggaggccgagggcgaggaggacccatgggccgtggaggctatggaggtggtggcagtggtggtggtggccgaggaggatttcccagtggaggtggtggcggtggaggacagcagcgagctggtgactggaagtgtcctaatcccacctgtgagaatatgaacttctcttggaggaatgaatgcaaccagtgtaaggcccctaaaccagatggcccaggagggggaccaggtggctctcacatggggggtaactacggggatgatcgtcgtggtggcagaggtggtgcgatcgcaggcgccgattacaaggacgatgatgacaagggagcaccaggaagtgctggttctgctgctggtagtggagcgtgcccggtgccgctgcagctgccgccgctggaacgcctgaccctggatgataaaaaaccgctgaataccctgatctctgctactggtctgtggatgagtcgtaccggaaccattcataaaatcaaacaccacgaggttagccgttcgaaaatctatattgagatggcgtgtggcgatcatctggttgtgaacaatagccgctcttctcgtacagcacgtgcactgcgtcaccacaaatatcgtaaaacctgtaaacgttgccgtgtgtccgatgaggatctgaacaaattcctgacaaaagccaatgaggaccaaacaagcgtgaaagtgaaagtcgttagcgctcctacccgtactaaaaaagcaatgccgaaatccgttgctcgtgcccctaaaccactggaaaacactgaagcagcacaggcacagccgtctggaagcaaattctctccggccattcctgtttctacccaggagtccgtttctgttccagcaagtgtgagcaccagcattagcagtattagcaccggtgccaccgctagcgccctggttaaaggcaataccaatccgattacaagcatgtctgccccggttcaagcatcagctccagcactgacaaaatcccaaaccgatcgtctggaggttctgctgaatccgaaagacgaaatcagcctgaattccggcaaaccgtttcgtgaactggagagcgaactgctgtcacgtcgtaaaaaagacctgcaacaaatctatgccgaagaacgtgagaactatctggggaaactggaacgtgaaatcacccgctttttcgtggatcgtggctttctggagatcaaatccccgattctgattcctctggagtatatcgagcgtatgggcatcgacaatgataccgaactgagcaaacaaattttccgtgtggataaaaacttctgtctgcgccctatgctagcaccaaatctggctaactatctgcgcaaactggaccgtgccctgcctgatcctatcaaaatcttcgagatcggcccgtgttatcgtaaagagtccgacggtaaagaacatctggaggagtttaccatgctgaacttttgccaaatgggttcaggttgtactcgtgagaacctggaaagcatcatcaccgattttctgaaccacctgggcattgacttcaaaattgtgggcgacagctgtatggtgtttggcgacaccctggatgtcatgcacggcgacctggaactgtctagtgccgttgtgggcccaatcccgctggatcgtgagtggggtatcgacaaaccttggatcggtgcgggttttggtctggagcgtctgctgaaagtaaaacacgacttcaagaacatcaaacgtgctgcacgttccgagtcctattacaatggtatttctactaacctgtaa

SEQ ID NO: 420 - protein, 1255 aa, Artificial Sequence
  Description of Artificial Sequence: Synthetic polypeptide
  EB1::FUS::PylRS(AF)
MAVNVYSTSVTSDNLSRHDMLAWINESLQLNLTKIEQLCSGAAYCQFMDMLFPGSIALKKVKFQAKLEHEYIQNFKILQAGFKRMGVDKIIPVDKLVKGKFQDNFEFVQWFKKFFDANYDGKDYDPVAARQGQETAVAPSLVAPALNKPKKPLTSSSAAPQRPISTQRTAAAPKAGPGVVRKNPGVGNGDDEAAELMQQVNVLKLTVEDLEKERDFYFGKLRNIELICQENEGENDPVLQRIVDILYATDEGFVIPDEGGPQEEQEEYGAPGSAGSAAGSGMASNDYTQQATQSYGAYPTQPGQGYSQQSSQPYGQQSYSGYSQSTDTSGYGQSSYSSYGQSQNTGYGTQSTPQGYGSTGGYGSSQSSQSSYGQQSSYPGYGQQPAPSSTSGSYGSSSQSSSYGQPQSGSYSQQPSYGGQQQSYGQQQSYNPPQGYGQQNQYNSSSGGGGGGGGGGNYGQDQSSMSSGGGSGGGYGNQDQSGGGGSGGYGQQDRGGRGRGGSGGGGGGGGGGYNRSSGGYEPRGRGGGRGGRGGMGGSDRGGFNKFGGPRDQGSRHDSEQDNSDNNTIFVQGLGENVTIESVADYFKQIGIIKTNKKTGQPMINLYTDRETGKLKGEATVSFDDPPSAKAAIDWFDGKEFSGNPIKVSFATRRADFNRGGGNGRGGRGRGGPMGRGGYGGGGSGGGGRGGFPSGGGGGGGQQRAGDWKCPNPTCENMNFSWRNECNQCKAPKPDGPGGGPGGSHMGGNYGDDRRGGRGGAIAGADYKDDDDKGAPGSAGSAAGSGACPVPLQLPPLERLTLDDKKPLNTLISATGLWMSRTGTIHKIKHHEVSRSKIYIEMACGDHLVVNNSRSSRTARALRHHKYRKTCKRCRVSDEDLNKFLTKANEDQTSVKVKVVSAPTRTKKAMPKSVARAPKPLENTEAAQAQPSGSKFSPAIPVSTQESVSVPASVSTSISSISTGATASALVKGNTNPITSMSAPVQASAPALTKSQTDRLEVLLNPKDEISLNSGKPFRELESELLSRRKKDLQQIYAEERENYLGKLEREITRFFVDRGFLEIKSPILIPLEYIERMGIDNDTELSKQIFRVDKNFCLRPMLAPNLANYLRKLDRALPDPIKIFEIGPCYRKESDGKEHLEEFTMLNFCQMGSGCTRENLESIITDFLNHLGIDFKIVGDSCMVFGDTLDVMHGDLELSSAVVGPIPLDREWGIDKPWIGAGFGLERLLKVKHDFKNIKRAARSESYYNGISTNL

SEQ ID NO: 421 - DNA, 4182 bp, Artificial Sequence
  Description of Artificial Sequence: Synthetic polynucleotide
  EB1::FUS::MCP::PylRS(AF)
atggcagtgaacgtatactcaacgtcagtgaccagtgataacctaagtcgacatgacatgctggcctggatcaatgagtctctgcagttgaatctgacaaagatcgaacagttgtgctcaggggctgcgtattgtcagtttatggacatgctgttccctggctccattgccttgaagaaagtgaaattccaagctaagctagaacacgagtacatccagaacttcaaaatactacaagcaggttttaagagaatgggtgttgacaaaataattcctgtggacaaattagtaaaaggaaagtttcaggacaattttgaattcgttcagtggttcaagaagtttttcgatgcaaactatgatggaaaagactatgaccctgtggctgccagacaaggtcaagaaactgcagtggctccttcccttgttgctccagctctgaataaaccgaagaaacctctcacttctagcagtgcagctccccagaggcccatctcaacacagagaaccgctgcggctcctaaggctggccctggtgtggtgcgaaagaaccctggtgtgggcaacggagatgacgaggcagctgagttgatgcagcaggtcaacgtattgaaacttactgttgaagacttggagaaagagagggatttctacttcggaaagctacggaacattgaattgatttgccaggagaacgagggggaaaacgaccctgtattgcagaggattgtagacattctgtatgccacagatgaaggctttgtgatacctgatgaagggggcccacaggaggagcaagaagagtatggagcacccggctccgccggctccgccgccggctccggcatggcctcaaacgattatacccaacaagcaacccaaagctatggggcctaccccacccagcccgggcagggctattcccagcagagcagtcagccctacggacagcagagttacagtggttatagccagtccacggacacttcaggatatggccagagcagctattcttcttatggccagagccagaacacaggctatggaactcagtcaactccccagggatatggctcgactggcggctatggcagtagccagagctcccaatcgtcttacgggcagcagtcctcctaccctggctatggccagcagccagctcccagcagcacctcgggaagttacggtagcagttctcagagcagcagctatgggcagccccagagtgggagctacagccagcagcctagctatggtggacagcagcaaagctatggacagcagcaaagctataatccccctcagggctatggacagcagaaccagtacaacagcagcagtggtggtggaggtggaggtggaggtggaggtaactatggccaagatcaatcctccatgagtagtggtggtggcagtggtggcggttatggcaatcaagaccagagtggtggaggtggcagcggtggctatggacagcaggaccgtggaggccgcggcaggggtggcagtggtggcggcggcggcggcggcggtggtggttacaaccgcagcagtggtggctatgaacccagaggtcgtggaggtggccgtggaggcagaggtggcatgggcggaagtgaccgtggtggcttcaataaatttggtggccctcgggaccaaggatcacgtcatgactccgaacaggataattcagacaacaacaccatctttgtgcaaggcctgggtgagaatgttacaattgagtctgtggctgattacttcaagcagattggtattattaagacaaacaagaaaacgggacagcccatgattaatttgtacacagacagggaaactggcaagctgaagggagaggcaacggtctcttttgatgacccaccttcagctaaagcagctattgactggtttgatggtaaagaattctccggaaatcctatcaaggtctcatttgctactcgccgggcagactttaatcggggtggtggcaatggtcgtggaggccgagggcgaggaggacccatgggccgtggaggctatggaggtggtggcagtggtggtggtggccgaggaggatttcccagtggaggtggtggcggtggaggacagcagcgagctggtgactggaagtgtcctaatcccacctgtgagaatatgaacttctcttggaggaatgaatgcaaccagtgtaaggcccctaaaccagatggcccaggagggggaccaggtggctctcacatggggggtaactacggggatgatcgtcgtggtggcagaggtggtgcgatcgcatatccctatgatgtgccggattatgctggagcaccaggaagtgctggttctgctgctggtagtggagcttctaactttactcagttcgttctcgtcgacaatggcggaactggcgacgtgactgtcgccccaagcaacttcgctaacgggatcgctgaatggatcagctctaactcgcgttcacaggcttacaaagtaacctgtagcgttcgtcagagctctgcgcagaatcgcaaatacaccatcaaagtcgaggtgcctaaaggcgcctggcgttcgtacttaaatatggaactaaccattccaattttcgccacgaattccgactgcgagcttattgttaaggcaatgcaaggtctcctaaaagatggaaacccgattccctcagcaatcgcagcaaactccggcatctacggcgccgattacaaggacgatgatgacaagggagcaccaggaagtgctggttctgctgctggtagtggagcgtgcccggtgccgctgcagctgccgccgctggaacgcctgaccctggatgataaaaaaccgctgaataccctgatctctgctactggtctgtggatgagtcgtaccggaaccattcataaaatcaaacaccacgaggttagccgttcgaaaatctatattgagatggcgtgtggcgatcatctggttgtgaacaatagccgctcttctcgtacagcacgtgcactgcgtcaccacaaatatcgtaaaacctgtaaacgttgccgtgtgtccgatgaggatctgaacaaattcctgacaaaagccaatgaggaccaaacaagcgtgaaagtgaaagtcgttagcgctcctacccgtactaaaaaagcaatgccgaaatccgttgctcgtgcccctaaaccactggaaaacactgaagcagcacaggcacagccgtctggaagcaaattctctccggccattcctgtttctacccaggagtccgtttctgttccagcaagtgtgagcaccagcattagcagtattagcaccggtgccaccgctagcgccctggttaaaggcaataccaatccgattacaagcatgtctgccccggttcaagcatcagctccagcactgacaaaatcccaaaccgatcgtctggaggttctgctgaatccgaaagacgaaatcagcctgaattccggcaaaccgtttcgtgaactggagagcgaactgctgtcacgtcgtaaaaaagacctgcaacaaatctatgccgaagaacgtgagaactatctggggaaactggaacgtgaaatcacccgctttttcgtggatcgtggctttctggagatcaaatccccgattctgattcctctggagtatatcgagcgtatgggcatcgacaatgataccgaactgagcaaacaaattttccgtgtggataaaaacttctgtctgcgccctatgctagcaccaaatctggctaactatctgcgcaaactggaccgtgccctgcctgatcctatcaaaatcttcgagatcggcccgtgttatcgtaaagagtccgacggtaaagaacatctggaggagtttaccatgctgaacttttgccaaatgggttcaggttgtactcgtgagaacctggaaagcatcatcaccgattttctgaaccacctgggcattgacttcaaaattgtgggcgacagctgtatggtgtttggcgacaccctggatgtcatgcacggcgacctggaactgtctagtgccgttgtgggcccaatcccgctggatcgtgagtggggtatcgacaaaccttggatcggtgcgggttttggtctggagcgtctgctgaaagtaaaacacgacttcaagaacatcaaacgtgctgcacgttccgagtcctattacaatggtatttctactaacctgtaa

SEQ ID NO: 422 - protein, 1393 aa, Artificial Sequence
  Description of Artificial Sequence: Synthetic polypeptide
  EB1::FUS::MCP::PylRS(AF)
MAVNVYSTSVTSDNLSRHDMLAWINESLQLNLTKIEQLCSGAAYCQFMDMLFPGSIALKKVKFQAKLEHEYIQNFKILQAGFKRMGVDKIIPVDKLVKGKFQDNFEFVQWFKKFFDANYDGKDYDPVAARQGQETAVAPSLVAPALNKPKKPLTSSSAAPQRPISTQRTAAAPKAGPGVVRKNPGVGNGDDEAAELMQQVNVLKLTVEDLEKERDFYFGKLRNIELICQENEGENDPVLQRIVDILYATDEGFVIPDEGGPQEEQEEYGAPGSAGSAAGSGMASNDYTQQATQSYGAYPTQPGQGYSQQSSQPYGQQSYSGYSQSTDTSGYGQSSYSSYGQSQNTGYGTQSTPQGYGSTGGYGSSQSSQSSYGQQSSYPGYGQQPAPSSTSGSYGSSSQSSSYGQPQSGSYSQQPSYGGQQQSYGQQQSYNPPQGYGQQNQYNSSSGGGGGGGGGGNYGQDQSSMSSGGGSGGGYGNQDQSGGGGSGGYGQQDRGGRGRGGSGGGGGGGGGGYNRSSGGYEPRGRGGGRGGRGGMGGSDRGGFNKFGGPRDQGSRHDSEQDNSDNNTIFVQGLGENVTIESVADYFKQIGIIKTNKKTGQPMINLYTDRETGKLKGEATVSFDDPPSAKAAIDWFDGKEFSGNPIKVSFATRRADFNRGGGNGRGGRGRGGPMGRGGYGGGGSGGGGRGGFPSGGGGGGGQQRAGDWKCPNPTCENMNFSWRNECNQCKAPKPDGPGGGPGGSHMGGNYGDDRRGGRGGAIAYPYDVPDYAGAPGSAGSAAGSGASNFTQFVLVDNGGTGDVTVAPSNFANGIAEWISSNSRSQAYKVTCSVRQSSAQNRKYTIKVEVPKGAWRSYLNMELTIPIFATNSDCELIVKAMQGLLKDGNPIPSAIAANSGIYGADYKDDDDKGAPGSAGSAAGSGACPVPLQLPPLERLTLDDKKPLNTLISATGLWMSRTGTIHKIKHHEVSRSKIYIEMACGDHLVVNNSRSSRTARALRHHKYRKTCKRCRVSDEDLNKFLTKANEDQTSVKVKVVSAPTRTKKAMPKSVARAPKPLENTEAAQAQPSGSKFSPAIPVSTQESVSVPASVSTSISSISTGATASALVKGNTNPITSMSAPVQASAPALTKSQTDRLEVLLNPKDEISLNSGKPFRELESELLSRRKKDLQQIYAEERENYLGKLEREITRFFVDRGFLEIKSPILIPLEYIERMGIDNDTELSKQIFRVDKNFCLRPMLAPNLANYLRKLDRALPDPIKIFEIGPCYRKESDGKEHLEEFTMLNFCQMGSGCTRENLESIITDFLNHLGIDFKIVGDSCMVFGDTLDVMHGDLELSSAVVGPIPLDREWGIDKPWIGAGFGLERLLKVKHDFKNIKRAARSESYYNGISTNL

SEQ ID NO: 423 - DNA, 3627 bp, Artificial Sequence
  Description of Artificial Sequence: Synthetic polynucleotide
  TOM20::FUS::PCP::PylRS(AF)
atggtgggtcggaacagcgccatcgccgccggtgtatgcggggcccttttcattgggtactgcatctacttcgaccgcaaaagacgaagtgaccccaacttcaagaacaggcttcgagaacgaagaaagaaacagaagcttgccaaggagagagctgggctttccaagttacctgaccttaaagatgctgaagctgttcagaaattcttcatggcctcaaacgattatacccaacaagcaacccaaagctatggggcctaccccacccagcccgggcagggctattcccagcagagcagtcagccctacggacagcagagttacagtggttatagccagtccacggacacttcaggatatggccagagcagctattcttcttatggccagagccagaacacaggctatggaactcagtcaactccccagggatatggctcgactggcggctatggcagtagccagagctcccaatcgtcttacgggcagcagtcctcctaccctggctatggccagcagccagctcccagcagcacctcgggaagttacggtagcagttctcagagcagcagctatgggcagccccagagtgggagctacagccagcagcctagctatggtggacagcagcaaagctatggacagcagcaaagctataatccccctcagggctatggacagcagaaccagtacaacagcagcagtggtggtggaggtggaggtggaggtggaggtaactatggccaagatcaatcctccatgagtagtggtggtggcagtggtggcggttatggcaatcaagaccagagtggtggaggtggcagcggtggctatggacagcaggaccgtggaggccgcggcaggggtggcagtggtggcggcggcggcggcggcggtggtggttacaaccgcagcagtggtggctatgaacccagaggtcgtggaggtggccgtggaggcagaggtggcatgggcggaagtgaccgtggtggcttcaataaatttggtggccctcgggaccaaggatcacgtcatgactccgaacaggataattcagacaacaacaccatctttgtgcaaggcctgggtgagaatgttacaattgagtctgtggctgattacttcaagcagattggtattattaagacaaacaagaaaacgggacagcccatgattaatttgtacacagacagggaaactggcaagctgaagggagaggcaacggtctcttttgatgacccaccttcagctaaagcagctattgactggtttgatggtaaagaattctccggaaatcctatcaaggtctcatttgctactcgccgggcagactttaatcggggtggtggcaatggtcgtggaggccgagggcgaggaggacccatgggccgtggaggctatggaggtggtggcagtggtggtggtggccgaggaggatttcccagtggaggtggtggcggtggaggacagcagcgagctggtgactggaagtgtcctaatcccacctgtgagaatatgaacttctcttggaggaatgaatgcaaccagtgtaaggcccctaaaccagatggcccaggagggggaccaggtggctctcacatggggggtaactacggggatgatcgtcgtggtggcagaggaggcgcgatcgcaggcaagcctattcccaaccccctgctgggcctggatagcaccggagcaccaggaagtgctggttctgctgctggtagtggagcatcgatagagcagaagctgatctcagaggaggacctgatcgaaggccgccatatgctagcctccaaaaccatcgttctttcggtcggcgaggctactcgcactctgactgagatccagtccaccgcagaccgtcagatcttcgaagagaaggtcgggcctctggtgggtcggctgcgcctcacggcttcgctccgtcaaaacggagccaagaccgcgtatcgcgtcaacctaaaactggatcaggcggacgtcgttgattccggacttccgaaagtgcgctacactcaggtatggtcgcacgacgtgacaatcgttgcgaatagcaccgaggcctcgcgcaaatcgttgtacgatttgaccaagtccctcgtcgcgacctcgcaggtcgaagatcttgtcgtcaaccttgtgccgctgggccgtgcggatccgctagccggtgctcctggttcagcaggaagcgcagcaggatcaggtgcgtgcccggtgccgctgcagctgccgccgctggaacgcctgaccctggatgataaaaaaccgctgaataccctgatctctgctactggtctgtggatgagtcgtaccggaaccattcataaaatcaaacaccacgaggttagccgttcgaaaatctatattgagatggcgtgtggcgatcatctggttgtgaacaatagccgctcttctcgtacagcacgtgcactgcgtcaccacaaatatcgtaaaacctgtaaacgttgccgtgtgtccgatgaggatctgaacaaattcctgacaaaagccaatgaggaccaaacaagcgtgaaagtgaaagtcgttagcgctcctacccgtactaaaaaagcaatgccgaaatccgttgctcgtgcccctaaaccactggaaaacactgaagcagcacaggcacagccgtctggaagcaaattctctccggccattcctgtttctacccaggagtccgtttctgttccagcaagtgtgagcaccagcattagcagtattagcaccggtgccaccgctagcgccctggttaaaggcaataccaatccgattacaagcatgtctgccccggttcaagcatcagctccagcactgacaaaatcccaaaccgatcgtctggaggttctgctgaatccgaaagacgaaatcagcctgaattccggcaaaccgtttcgtgaactggagagcgaactgctgtcacgtcgtaaaaaagacctgcaacaaatctatgccgaagaacgtgagaactatctggggaaactggaacgtgaaatcacccgctttttcgtggatcgtggctttctggagatcaaatccccgattctgattcctctggagtatatcgagcgtatgggcatcgacaatgataccgaactgagcaaacaaattttccgtgtggataaaaacttctgtctgcgccctatgctagcaccaaatctggctaactatctgcgcaaactggaccgtgccctgcctgatcctatcaaaatcttcgagatcggcccgtgttatcgtaaagagtccgacggtaaagaacatctggaggagtttaccatgctgaacttttgccaaatgggttcaggttgtactcgtgagaacctggaaagcatcatcaccgattttctgaaccacctgggcattgacttcaaaattgtgggcgacagctgtatggtgtttggcgacaccctggatgtcatgcacggcgacctggaactgtctagtgccgttgtgggcccaatcccgctggatcgtgagtggggtatcgacaaaccttggatcggtgcgggttttggtctggagcgtctgctgaaagtaaaacacgacttcaagaacatcaaacgtgctgcacgttccgagtcctattacaatggtatttctactaacctgtaa

SEQ ID NO: 424 - protein, 1208 aa, Artificial Sequence
  Description of Artificial Sequence: Synthetic polypeptide
  TOM20::FUS::PCP::PylRS(AF)
MVGRNSAIAAGVCGALFIGYCIYFDRKRRSDPNFKNRLRERRKKQKLAKERAGLSKLPDLKDAEAVQKFFMASNDYTQQATQSYGAYPTQPGQGYSQQSSQPYGQQSYSGYSQSTDTSGYGQSSYSSYGQSQNTGYGTQSTPQGYGSTGGYGSSQSSQSSYGQQSSYPGYGQQPAPSSTSGSYGSSSQSSSYGQPQSGSYSQQPSYGGQQQSYGQQQSYNPPQGYGQQNQYNSSSGGGGGGGGGGNYGQDQSSMSSGGGSGGGYGNQDQSGGGGSGGYGQQDRGGRGRGGSGGGGGGGGGGYNRSSGGYEPRGRGGGRGGRGGMGGSDRGGFNKFGGPRDQGSRHDSEQDNSDNNTIFVQGLGENVTIESVADYFKQIGIIKTNKKTGQPMINLYTDRETGKLKGEATVSFDDPPSAKAAIDWFDGKEFSGNPIKVSFATRRADFNRGGGNGRGGRGRGGPMGRGGYGGGGSGGGGRGGFPSGGGGGGGQQRAGDWKCPNPTCENMNFSWRNECNQCKAPKPDGPGGGPGGSHMGGNYGDDRRGGRGGAIAGKPIPNPLLGLDSTGAPGSAGSAAGSGASIEQKLISEEDLIEGRHMLASKTIVLSVGEATRTLTEIQSTADRQIFEEKVGPLVGRLRLTASLRQNGAKTAYRVNLKLDQADVVDSGLPKVRYTQVWSHDVTIVANSTEASRKSLYDLTKSLVATSQVEDLVVNLVPLGRADPLAGAPGSAGSAAGSGACPVPLQLPPLERLTLDDKKPLNTLISATGLWMSRTGTIHKIKHHEVSRSKIYIEMACGDHLVVNNSRSSRTARALRHHKYRKTCKRCRVSDEDLNKFLTKANEDQTSVKVKVVSAPTRTKKAMPKSVARAPKPLENTEAAQAQPSGSKFSPAIPVSTQESVSVPASVSTSISSISTGATASALVKGNTNPITSMSAPVQASAPALTKSQTDRLEVLLNPKDEISLNSGKPFRELESELLSRRKKDLQQIYAEERENYLGKLEREITRFFVDRGFLEIKSPILIPLEYIERMGIDNDTELSKQIFRVDKNFCLRPMLAPNLANYLRKLDRALPDPIKIFEIGPCYRKESDGKEHLEEFTMLNFCQMGSGCTRENLESIITDFLNHLGIDFKIVGDSCMVFGDTLDVMHGDLELSSAVVGPIPLDREWGIDKPWIGAGFGLERLLKVKHDFKNIKRAARSESYYNGISTNL

SEQ ID NO: 425 - DNA, 4005 bp, Artificial Sequence
  Description of Artificial Sequence: Synthetic polynucleotide
  TOM20::FUS::2xPCP::PylRS(AF)
atggtgggtcggaacagcgccatcgccgccggtgtatgcggggcccttttcattgggtactgcatctacttcgaccgcaaaagacgaagtgaccccaacttcaagaacaggcttcgagaacgaagaaagaaacagaagcttgccaaggagagagctgggctttccaagttacctgaccttaaagatgctgaagctgttcagaaattcttcatggcctcaaacgattatacccaacaagcaacccaaagctatggggcctaccccacccagcccgggcagggctattcccagcagagcagtcagccctacggacagcagagttacagtggttatagccagtccacggacacttcaggatatggccagagcagctattcttcttatggccagagccagaacacaggctatggaactcagtcaactccccagggatatggctcgactggcggctatggcagtagccagagctcccaatcgtcttacgggcagcagtcctcctaccctggctatggccagcagccagctcccagcagcacctcgggaagttacggtagcagttctcagagcagcagctatgggcagccccagagtgggagctacagccagcagcctagctatggtggacagcagcaaagctatggacagcagcaaagctataatccccctcagggctatggacagcagaaccagtacaacagcagcagtggtggtggaggtggaggtggaggtggaggtaactatggccaagatcaatcctccatgagtagtggtggtggcagtggtggcggttatggcaatcaagaccagagtggtggaggtggcagcggtggctatggacagcaggaccgtggaggccgcggcaggggtggcagtggtggcggcggcggcggcggcggtggtggttacaaccgcagcagtggtggctatgaacccagaggtcgtggaggtggccgtggaggcagaggtggcatgggcggaagtgaccgtggtggcttcaataaatttggtggccctcgggaccaaggatcacgtcatgactccgaacaggataattcagacaacaacaccatctttgtgcaaggcctgggtgagaatgttacaattgagtctgtggctgattacttcaagcagattggtattattaagacaaacaagaaaacgggacagcccatgattaatttgtacacagacagggaaactggcaagctgaagggagaggcaacggtctcttttgatgacccaccttcagctaaagcagctattgactggtttgatggtaaagaattctccggaaatcctatcaaggtctcatttgctactcgccgggcagactttaatcggggtggtggcaatggtcgtggaggccgagggcgaggaggacccatgggccgtggaggctatggaggtggtggcagtggtggtggtggccgaggaggatttcccagtggaggtggtggcggtggaggacagcagcgagctggtgactggaagtgtcctaatcccacctgtgagaatatgaacttctcttggaggaatgaatgcaaccagtgtaaggcccctaaaccagatggcccaggagggggaccaggtggctctcacatggggggtaactacggggatgatcgtcgtggtggcagaggaggcgcgatcgcaggcaagcctattcccaaccccctgctgggcctggatagcaccggagcaccaggaagtgctggttctgctgctggtagtggagcatcgatagagcagaagctgatctcagaggaggacctgatcgaaggccgccatatgctagcctccaaaaccatcgttctttcggtcggcgaggctactcgcactctgactgagatccagtccaccgcagaccgtcagatcttcgaagagaaggtcgggcctctggtgggtcggctgcgcctcacggcttcgctccgtcaaaacggagccaagaccgcgtatcgcgtcaacctaaaactggatcaggcggacgtcgttgattccggacttccgaaagtgcgctacactcaggtatggtcgcacgacgtgacaatcgttgcgaatagcaccgaggcctcgcgcaaatcgttgtacgatttgaccaagtccctcgtcgcgacctcgcaggtcgaagatcttgtcgtcaaccttgtgccgctgggccgtgcggatccgctagcctccaaaaccatcgttctttcggtcggcgaggctactcgcactctgactgagatccagtccaccgcagaccgtcagatcttcgaagagaaggtcgggcctctggtgggtcggctgcgcctcacggcttcgctccgtcaaaacggagccaagaccgcgtatcgcgtcaacctaaaactggatcaggcggacgtcgttgattccggacttccgaaagtgcgctacactcaggtatggtcgcacgacgtgacaatcgttgcgaatagcaccgaggcctcgcgcaaatcgttgtacgatttgaccaagtccctcgtcgcgacctcgcaggtcgaagatcttgtcgtcaaccttgtgccgctgggccgtccaccggtcgccaccggtgctcctggttcagcaggaagcgcagcaggatcaggtgcgtgcccggtgccgctgcagctgccgccgctggaacgcctgaccctggatgataaaaaaccgctgaataccctgatctctgctactggtctgtggatgagtcgtaccggaaccattcataaaatcaaacaccacgaggttagccgttcgaaaatctatattgagatggcgtgtggcgatcatctggttgtgaacaatagccgctcttctcgtacagcacgtgcactgcgtcaccacaaatatcgtaaaacctgtaaacgttgccgtgtgtccgatgaggatctgaacaaattcctgacaaaagccaatgaggaccaaacaagcgtgaaagtgaaagtcgttagcgctcctacccgtactaaaaaagcaatgccgaaatccgttgctcgtgcccctaaaccactggaaaacactgaagcagcacaggcacagccgtctggaagcaaattctctccggccattcctgtttctacccaggagtccgtttctgttccagcaagtgtgagcaccagcattagcagtattagcaccggtgccaccgctagcgccctggttaaaggcaataccaatccgattacaagcatgtctgccccggttcaagcatcagctccagcactgacaaaatcccaaaccgatcgtctggaggttctgctgaatccgaaagacgaaatcagcctgaattccggcaaaccgtttcgtgaactggagagcgaactgctgtcacgtcgtaaaaaagacctgcaacaaatctatgccgaagaacgtgagaactatctggggaaactggaacgtgaaatcacccgctttttcgtggatcgtggctttctggagatcaaatccccgattctgattcctctggagtatatcgagcgtatgggcatcgacaatgataccgaactgagcaaacaaattttccgtgtggataaaaacttctgtctgcgccctatgctagcaccaaatctggctaactatctgcgcaaactggaccgtgccctgcctgatcctatcaaaatcttcgagatcggcccgtgttatcgtaaagagtccgacggtaaagaacatctggaggagtttaccatgctgaacttttgccaaatgggttcaggttgtactcgtgagaacctggaaagcatcatcaccgattttctgaaccacctgggcattgacttcaaaattgtgggcgacagctgtatggtgtttggcgacaccctggatgtcatgcacggcgacctggaactgtctagtgccgttgtgggcccaatcccgctggatcgtgagtggggtatcgacaaaccttggatcggtgcgggttttggtctggagcgtctgctgaaagtaaaacacgacttcaagaacatcaaacgtgctgcacgttccgagtcctattacaatggtatttctactaacctgtaa

SEQ ID NO: 426 - protein, 1334 aa, Artificial Sequence
  Description of Artificial Sequence: Synthetic polypeptide
  TOM20::FUS::2xPCP::PylRS(AF)
MVGRNSAIAAGVCGALFIGYCIYFDRKRRSDPNFKNRLRERRKKQKLAKERAGLSKLPDLKDAEAVQKFFMASNDYTQQATQSYGAYPTQPGQGYSQQSSQPYGQQSYSGYSQSTDTSGYGQSSYSSYGQSQNTGYGTQSTPQGYGSTGGYGSSQSSQSSYGQQSSYPGYGQQPAPSSTSGSYGSSSQSSSYGQPQSGSYSQQPSYGGQQQSYGQQQSYNPPQGYGQQNQYNSSSGGGGGGGGGGNYGQDQSSMSSGGGSGGGYGNQDQSGGGGSGGYGQQDRGGRGRGGSGGGGGGGGGGYNRSSGGYEPRGRGGGRGGRGGMGGSDRGGFNKFGGPRDQGSRHDSEQDNSDNNTIFVQGLGENVTIESVADYFKQIGIIKTNKKTGQPMINLYTDRETGKLKGEATVSFDDPPSAKAAIDWFDGKEFSGNPIKVSFATRRADFNRGGGNGRGGRGRGGPMGRGGYGGGGSGGGGRGGFPSGGGGGGGQQRAGDWKCPNPTCENMNFSWRNECNQCKAPKPDGPGGGPGGSHMGGNYGDDRRGGRGGAIAGKPIPNPLLGLDSTGAPGSAGSAAGSGASIEQKLISEEDLIEGRHMLASKTIVLSVGEATRTLTEIQSTADRQIFEEKVGPLVGRLRLTASLRQNGAKTAYRVNLKLDQADVVDSGLPKVRYTQVWSHDVTIVANSTEASRKSLYDLTKSLVATSQVEDLVVNLVPLGRADPLASKTIVLSVGEATRTLTEIQSTADRQIFEEKVGPLVGRLRLTASLRQNGAKTAYRVNLKLDQADVVDSGLPKVRYTQVWSHDVTIVANSTEASRKSLYDLTKSLVATSQVEDLVVNLVPLGRPPVATGAPGSAGSAAGSGACPVPLQLPPLERLTLDDKKPLNTLISATGLWMSRTGTIHKIKHHEVSRSKIYIEMACGDHLVVNNSRSSRTARALRHHKYRKTCKRCRVSDEDLNKFLTKANEDQTSVKVKVVSAPTRTKKAMPKSVARAPKPLENTEAAQAQPSGSKFSPAIPVSTQESVSVPASVSTSISSISTGATASALVKGNTNPITSMSAPVQASAPALTKSQTDRLEVLLNPKDEISLNSGKPFRELESELLSRRKKDLQQIYAEERENYLGKLEREITRFFVDRGFLEIKSPILIPLEYIERMGIDNDTELSKQIFRVDKNFCLRPMLAPNLANYLRKLDRALPDPIKIFEIGPCYRKESDGKEHLEEFTMLNFCQMGSGCTRENLESIITDFLNHLGIDFKIVGDSCMVFGDTLDVMHGDLELSSAVVGPIPLDREWGIDKPWIGAGFGLERLLKVKHDFKNIKRAARSESYYNGISTNL

SEQ ID NO: 427 - DNA, 3714 bp, Artificial Sequence
  Description of Artificial Sequence: Synthetic polynucleotide
  TOM20::FUS::4xlambdaN22::PylRS(AF)
atggtgggtcggaacagcgccatcgccgccggtgtatgcggggcccttttcattgggtactgcatctacttcgaccgcaaaagacgaagtgaccccaacttcaagaacaggcttcgagaacgaagaaagaaacagaagcttgccaaggagagagctgggctttccaagttacctgaccttaaagatgctgaagctgttcagaaattcttcatggcctcaaacgattatacccaacaagcaacccaaagctatggggcctaccccacccagcccgggcagggctattcccagcagagcagtcagccctacggacagcagagttacagtggttatagccagtccacggacacttcaggatatggccagagcagctattcttcttatggccagagccagaacacaggctatggaactcagtcaactccccagggatatggctcgactggcggctatggcagtagccagagctcccaatcgtcttacgggcagcagtcctcctaccctggctatggccagcagccagctcccagcagcacctcgggaagttacggtagcagttctcagagcagcagctatgggcagccccagagtgggagctacagccagcagcctagctatggtggacagcagcaaagctatggacagcagcaaagctataatccccctcagggctatggacagcagaaccagtacaacagcagcagtggtggtggaggtggaggtggaggtggaggtaactatggccaagatcaatcctccatgagtagtggtggtggcagtggtggcggttatggcaatcaagaccagagtggtggaggtggcagcggtggctatggacagcaggaccgtggaggccgcggcaggggtggcagtggtggcggcggcggcggcggcggtggtggttacaaccgcagcagtggtggctatgaacccagaggtcgtggaggtggccgtggaggcagaggtggcatgggcggaagtgaccgtggtggcttcaataaatttggtggccctcgggaccaaggatcacgtcatgactccgaacaggataattcagacaacaacaccatctttgtgcaaggcctgggtgagaatgttacaattgagtctgtggctgattacttcaagcagattggtattattaagacaaacaagaaaacgggacagcccatgattaatttgtacacagacagggaaactggcaagctgaagggagaggcaacggtctcttttgatgacccaccttcagctaaagcagctattgactggtttgatggtaaagaattctccggaaatcctatcaaggtctcatttgctactcgccgggcagactttaatcggggtggtggcaatggtcgtggaggccgagggcgaggaggacccatgggccgtggaggctatggaggtggtggcagtggtggtggtggccgaggaggatttcccagtggaggtggtggcggtggaggacagcagcgagctggtgactggaagtgtcctaatcccacctgtgagaatatgaacttctcttggaggaatgaatgcaaccagtgtaaggcccctaaaccagatggcccaggagggggaccaggtggctctcacatggggggtaactacggggatgatcgtcgtggtggcagaggaggcgcgatcgcaggcaagcctattcccaaccccctgctgggcctggatagcaccggagcaccaggaagtgctggttctgctgctggtagtggagcatcgatagagcagaagctgatctcagaggaggacctgctagccaccatggacgcacaaacacgacgacgtgagcgtcgcgctgagaaacaagctcaatggaaagctgcaaacccaccgctcgacggagccggagctggcgctggagctggagccggagctggcggtctagccaccatggacgcacaaacacgacgacgtgagcgtcgcgctgagaaacaagctcaatggaaagctgcaaacccaccgctcgacggagccggagctggcgctggagctggagccggagctggcggtctagccaccatggacgcacaaacacgacgacgtgagcgtcgcgctgagaaacaagctcaatggaaagctgcaaacccaccgctcgacggagccggagctggcgctggagctggagccggagctggcggtctagccaccatggacgcacaaacacgacgacgtgagcgtcgcgctgagaaacaagctcaatggaaagctgcaaacccaccgctcgagtctagagggcccgttggtgctcctggttcagcaggaagcgcagcaggatcaggtgcgtgcccggtgccgctgcagctgccgccgctggaacgcctgaccctggatgataaaaaaccgctgaataccctgatctctgctactggtctgtggatgagtcgtaccggaaccattcataaaatcaaacaccacgaggttagccgttcgaaaatctatattgagatggcgtgtggcgatcatctggttgtgaacaatagccgctcttctcgtacagcacgtgcactgcgtcaccacaaatatcgtaaaacctgtaaacgttgccgtgtgtccgatgaggatctgaacaaattcctgacaaaagccaatgaggaccaaacaagcgtgaaagtgaaagtcgttagcgctcctacccgtactaaaaaagcaatgccgaaatccgttgctcgtgcccctaaaccactggaaaacactgaagcagcacaggcacagccgtctggaagcaaattctctccggccattcctgtttctacccaggagtccgtttctgttccagcaagtgtgagcaccagcattagcagtattagcaccggtgccaccgctagcgccctggttaaaggcaataccaatccgattacaagcatgtctgccccggttcaagcatcagctccagcactgacaaaatcccaaaccgatcgtctggaggttctgctgaatccgaaagacgaaatcagcctgaattccggcaaaccgtttcgtgaactggagagcgaactgctgtcacgtcgtaaaaaagacctgcaacaaatctatgccgaagaacgtgagaactatctggggaaactggaacgtgaaatcacccgctttttcgtggatcgtggctttctggagatcaaatccccgattctgattcctctggagtatatcgagcgtatgggcatcgacaatgataccgaactgagcaaacaaattttccgtgtggataaaaacttctgtctgcgccctatgctagcaccaaatctggctaactatctgcgcaaactggaccgtgccctgcctgatcctatcaaaatcttcgagatcggcccgtgttatcgtaaagagtccgacggtaaagaacatctggaggagtttaccatgctgaacttttgccaaatgggttcaggttgtactcgtgagaacctggaaagcatcatcaccgattttctgaaccacctgggcattgacttcaaaattgtgggcgacagctgtatggtgtttggcgacaccctggatgtcatgcacggcgacctggaactgtctagtgccgttgtgggcccaatcccgctggatcgtgagtggggtatcgacaaaccttggatcggtgcgggttttggtctggagcgtctgctgaaagtaaaacacgacttcaagaacatcaaacgtgctgcacgttccgagtcctattacaatggtatttctactaacctgtaa

SEQ ID NO: 428 - protein, 1237 aa, Artificial Sequence
  Description of Artificial Sequence: Synthetic polypeptide
  TOM20::FUS::4xlambdaN22::PylRS(AF)
MVGRNSAIAAGVCGALFIGYCIYFDRKRRSDPNFKNRLRERRKKQKLAKERAGLSKLPDLKDAEAVQKFFMASNDYTQQATQSYGAYPTQPGQGYSQQSSQPYGQQSYSGYSQSTDTSGYGQSSYSSYGQSQNTGYGTQSTPQGYGSTGGYGSSQSSQSSYGQQSSYPGYGQQPAPSSTSGSYGSSSQSSSYGQPQSGSYSQQPSYGGQQQSYGQQQSYNPPQGYGQQNQYNSSSGGGGGGGGGGNYGQDQSSMSSGGGSGGGYGNQDQSGGGGSGGYGQQDRGGRGRGGSGGGGGGGGGGYNRSSGGYEPRGRGGGRGGRGGMGGSDRGGFNKFGGPRDQGSRHDSEQDNSDNNTIFVQGLGENVTIESVADYFKQIGIIKTNKKTGQPMINLYTDRETGKLKGEATVSFDDPPSAKAAIDWFDGKEFSGNPIKVSFATRRADFNRGGGNGRGGRGRGGPMGRGGYGGGGSGGGGRGGFPSGGGGGGGQQRAGDWKCPNPTCENMNFSWRNECNQCKAPKPDGPGGGPGGSHMGGNYGDDRRGGRGGAIAGKPIPNPLLGLDSTGAPGSAGSAAGSGASIEQKLISEEDLLATMDAQTRRRERRAEKQAQWKAANPPLDGAGAGAGAGAGAGGLATMDAQTRRRERRAEKQAQWKAANPPLDGAGAGAGAGAGAGGLATMDAQTRRRERRAEKQAQWKAANPPLDGAGAGAGAGAGAGGLATMDAQTRRRERRAEKQAQWKAANPPLESRGPVGAPGSAGSAAGSGACPVPLQLPPLERLTLDDKKPLNTLISATGLWMSRTGTIHKIKHHEVSRSKIYIEMACGDHLVVNNSRSSRTARALRHHKYRKTCKRCRVSDEDLNKFLTKANEDQTSVKVKVVSAPTRTKKAMPKSVARAPKPLENTEAAQAQPSGSKFSPAIPVSTQESVSVPASVSTSISSISTGATASALVKGNTNPITSMSAPVQASAPALTKSQTDRLEVLLNPKDEISLNSGKPFRELESELLSRRKKDLQQIYAEERENYLGKLEREITRFFVDRGFLEIKSPILIPLEYIERMGIDNDTELSKQIFRVDKNFCLRPMLAPNLANYLRKLDRALPDPIKIFEIGPCYRKESDGKEHLEEFTMLNFCQMGSGCTRENLESIITDFLNHLGIDFKIVGDSCMVFGDTLDVMHGDLELSSAVVGPIPLDREWGIDKPWIGAGFGLERLLKVKHDFKNIKRAARSESYYNGISTNL

SEQ ID NO: 429 - DNA, 3822 bp, Artificial Sequence
  Description of Artificial Sequence: Synthetic polynucleotide
  LCK::FUS::2xPCP::CbzRS
atgggctgcgtgtgcagcagcaaccccgagggtaccgagctcgcctcaaacgattatacccaacaagcaacccaaagctatggggcctaccccacccagcccgggcagggctattcccagcagagcagtcagccctacggacagcagagttacagtggttatagccagtccacggacacttcaggatatggccagagcagctattcttcttatggccagagccagaacacaggctatggaactcagtcaactccccagggatatggctcgactggcggctatggcagtagccagagctcccaatcgtcttacgggcagcagtcctcctaccctggctatggccagcagccagctcccagcagcacctcgggaagttacggtagcagttctcagagcagcagctatgggcagccccagagtgggagctacagccagcagcctagctatggtggacagcagcaaagctatggacagcagcaaagctataatccccctcagggctatggacagcagaaccagtacaacagcagcagtggtggtggaggtggaggtggaggtggaggtaactatggccaagatcaatcctccatgagtagtggtggtggcagtggtggcggttatggcaatcaagaccagagtggtggaggtggcagcggtggctatggacagcaggaccgtggaggccgcggcaggggtggcagtggtggcggcggcggcggcggcggtggtggttacaaccgcagcagtggtggctatgaacccagaggtcgtggaggtggccgtggaggcagaggtggcatgggcggaagtgaccgtggtggcttcaataaatttggtggccctcgggaccaaggatcacgtcatgactccgaacaggataattcagacaacaacaccatctttgtgcaaggcctgggtgagaatgttacaattgagtctgtggctgattacttcaagcagattggtattattaagacaaacaagaaaacgggacagcccatgattaatttgtacacagacagggaaactggcaagctgaagggagaggcaacggtctcttttgatgacccaccttcagctaaagcagctattgactggtttgatggtaaagaattctccggaaatcctatcaaggtctcatttgctactcgccgggcagactttaatcggggtggtggcaatggtcgtggaggccgagggcgaggaggacccatgggccgtggaggctatggaggtggtggcagtggtggtggtggccgaggaggatttcccagtggaggtggtggcggtggaggacagcagcgagctggtgactggaagtgtcctaatcccacctgtgagaatatgaacttctcttggaggaatgaatgcaaccagtgtaaggcccctaaaccagatggcccaggagggggaccaggtggctctcacatggggggtaactacggggatgatcgtcgtggtggcagaggaggcgcgatcgcaggcgccgattacaaggacgatgatgacaagggagcaccaggaagtgctggttctgctgctggtagtggagcatcgatagagcagaagctgatctcagaggaggacctgatcgaaggccgccatatgctagcctccaaaaccatcgttctttcggtcggcgaggctactcgcactctgactgagatccagtccaccgcagaccgtcagatcttcgaagagaaggtcgggcctctggtgggtcggctgcgcctcacggcttcgctccgtcaaaacggagccaagaccgcgtatcgcgtcaacctaaaactggatcaggcggacgtcgttgattccggacttccgaaagtgcgctacactcaggtatggtcgcacgacgtgacaatcgttgcgaatagcaccgaggcctcgcgcaaatcgttgtacgatttgaccaagtccctcgtcgcgacctcgcaggtcgaagatcttgtcgtcaaccttgtgccgctgggccgtgcggatccgctagcctccaaaaccatcgttctttcggtcggcgaggctactcgcactctgactgagatccagtccaccgcagaccgtcagatcttcgaagagaaggtcgggcctctggtgggtcggctgcgcctcacggcttcgctccgtcaaaacggagccaagaccgcgtatcgcgtcaacctaaaactggatcaggcggacgtcgttgattccggacttccgaaagtgcgctacactcaggtatggtcgcacgacgtgacaatcgttgcgaatagcaccgaggcctcgcgcaaatcgttgtacgatttgaccaagtccctcgtcgcgacctcgcaggtcgaagatcttgtcgtcaaccttgtgccgctgggccgtccaccggtcgccaccggtgctcctggttcagcaggaagcgcagcaggatcaggtgcgtgcccggtgccgctgcagctgccgccgctggaacgcctgaccctggatgacaaaaaaccgctgaataccctgatctctgctactggtctgtggatgagtcgtaccggaaccattcataaaatcaaacaccacgaggttagccgttcgaaaatctatattgagatggcgtgtggcgatcatctggttgtgaacaatagccgctcttctcgtacagcacgtgcactgcgtcaccacaaatatcgtaaaacctgtaaacgttgccgtgtgtccgatgaggatctgaacaaattcctgacaaaagccaatgaggaccaaacaagcgtgaaagtgaaagtcgttagcgctcctacccgtactaaaaaagcaatgccgaaatccgttgctcgtgcccctaaaccactggaaaacactgaagcagcacaggcacagccgtctggaagcaaattctctccggccattcctgtttctacccaggagtccgtttctgttccagcaagtgtgagcaccagcattagcagtattagcaccggtgccaccgctagcgccctggttaaaggcaataccaatccgattacaagcatgtctgccccggttcaagcatcagctccagcactgacaaaatcccaaaccgatcgtctggaggttctgctgaatccgaaagacgaaatcagcctgaattccggcaaaccgtttcgtgaactggagagcgaactgctgtcacgtcgtaaaaaagacctgcaacaaatctatgccgaagaacgtgagaactatctggggaaactggaacgtgaaatcacccgctttttcgtggatcgtggctttctggagatcaaatccccgattctgattcctctggagtatatcgagcgtatgggcatcgacaatgataccgaactgagcaaacaaattttccgtgtggataaaaacttctgtctgcgccctatgcttgcaccaaatctgatgaactatggacgcaaactggaccgtgccctgcctgatcctatcaaaatcttcgagatcggcccgtgttatcgtaaagagtccgacggtaaagaacatctggaggagtttaccatgctgaactttacacaaatgggttcaggttgtactcgtgagaacctggaaagcatcatcaccgattttctgaaccacctgggcattgacttcaaaattgtgggcgacagctgtatggtgtatggcgacaccctggatgtcatgcacggcgacctggaactgtctagtgccgttgttggaccaattccgctggaccgtgagtggggtatcgacaaaccgtggatcggagcaggattcggtctggaacgcctgctgaaagtgaaacacgacttcaaaaacatcaaacgtgccgcccgttctgaatcgtattataacgggatctctacgaacctgtaa

SEQ ID NO: 430 - protein, 1273 aa, Artificial Sequence
  Description of Artificial Sequence: Synthetic polypeptide
  LCK::FUS::2xPCP::CbzRS
MGCVCSSNPEGTELASNDYTQQATQSYGAYPTQPGQGYSQQSSQPYGQQSYSGYSQSTDTSGYGQSSYSSYGQSQNTGYGTQSTPQGYGSTGGYGSSQSSQSSYGQQSSYPGYGQQPAPSSTSGSYGSSSQSSSYGQPQSGSYSQQPSYGGQQQSYGQQQSYNPPQGYGQQNQYNSSSGGGGGGGGGGNYGQDQSSMSSGGGSGGGYGNQDQSGGGGSGGYGQQDRGGRGRGGSGGGGGGGGGGYNRSSGGYEPRGRGGGRGGRGGMGGSDRGGFNKFGGPRDQGSRHDSEQDNSDNNTIFVQGLGENVTIESVADYFKQIGIIKTNKKTGQPMINLYTDRETGKLKGEATVSFDDPPSAKAAIDWFDGKEFSGNPIKVSFATRRADFNRGGGNGRGGRGRGGPMGRGGYGGGGSGGGGRGGFPSGGGGGGGQQRAGDWKCPNPTCENMNFSWRNECNQCKAPKPDGPGGGPGGSHMGGNYGDDRRGGRGGAIAGADYKDDDDKGAPGSAGSAAGSGASIEQKLISEEDLIEGRHMLASKTIVLSVGEATRTLTEIQSTADRQIFEEKVGPLVGRLRLTASLRQNGAKTAYRVNLKLDQADVVDSGLPKVRYTQVWSHDVTIVANSTEASRKSLYDLTKSLVATSQVEDLVVNLVPLGRADPLASKTIVLSVGEATRTLTEIQSTADRQIFEEKVGPLVGRLRLTASLRQNGAKTAYRVNLKLDQADVVDSGLPKVRYTQVWSHDVTIVANSTEASRKSLYDLTKSLVATSQVEDLVVNLVPLGRPPVATGAPGSAGSAAGSGACPVPLQLPPLERLTLDDKKPLNTLISATGLWMSRTGTIHKIKHHEVSRSKIYIEMACGDHLVVNNSRSSRTARALRHHKYRKTCKRCRVSDEDLNKFLTKANEDQTSVKVKVVSAPTRTKKAMPKSVARAPKPLENTEAAQAQPSGSKFSPAIPVSTQESVSVPASVSTSISSISTGATASALVKGNTNPITSMSAPVQASAPALTKSQTDRLEVLLNPKDEISLNSGKPFRELESELLSRRKKDLQQIYAEERENYLGKLEREITRFFVDRGFLEIKSPILIPLEYIERMGIDNDTELSKQIFRVDKNFCLRPMLAPNLMNYGRKLDRALPDPIKIFEIGPCYRKESDGKEHLEEFTMLNFTQMGSGCTRENLESIITDFLNHLGIDFKIVGDSCMVYGDTLDVMHGDLELSSAVVGPIPLDREWGIDKPWIGAGFGLERLLKVKHDFKNIKRAARSESYYNGISTNL

SEQ ID NO: 431 - DNA, 3444 bp, Artificial Sequence
  Description of Artificial Sequence: Synthetic polynucleotide
  LCK::FUS::PCP::CbzRS
atgggctgcgtgtgcagcagcaaccccgagggtaccgagctcgcctcaaacgattatacccaacaagcaacccaaagctatggggcctaccccacccagcccgggcagggctattcccagcagagcagtcagccctacggacagcagagttacagtggttatagccagtccacggacacttcaggatatggccagagcagctattcttcttatggccagagccagaacacaggctatggaactcagtcaactccccagggatatggctcgactggcggctatggcagtagccagagctcccaatcgtcttacgggcagcagtcctcctaccctggctatggccagcagccagctcccagcagcacctcgggaagttacggtagcagttctcagagcagcagctatgggcagccccagagtgggagctacagccagcagcctagctatggtggacagcagcaaagctatggacagcagcaaagctataatccccctcagggctatggacagcagaaccagtacaacagcagcagtggtggtggaggtggaggtggaggtggaggtaactatggccaagatcaatcctccatgagtagtggtggtggcagtggtggcggttatggcaatcaagaccagagtggtggaggtggcagcggtggctatggacagcaggaccgtggaggccgcggcaggggtggcagtggtggcggcggcggcggcggcggtggtggttacaaccgcagcagtggtggctatgaacccagaggtcgtggaggtggccgtggaggcagaggtggcatgggcggaagtgaccgtggtggcttcaataaatttggtggccctcgggaccaaggatcacgtcatgactccgaacaggataattcagacaacaacaccatctttgtgcaaggcctgggtgagaatgttacaattgagtctgtggctgattacttcaagcagattggtattattaagacaaacaagaaaacgggacagcccatgattaatttgtacacagacagggaaactggcaagctgaagggagaggcaacggtctcttttgatgacccaccttcagctaaagcagctattgactggtttgatggtaaagaattctccggaaatcctatcaaggtctcatttgctactcgccgggcagactttaatcggggtggtggcaatggtcgtggaggccgagggcgaggaggacccatgggccgtggaggctatggaggtggtggcagtggtggtggtggccgaggaggatttcccagtggaggtggtggcggtggaggacagcagcgagctggtgactggaagtgtcctaatcccacctgtgagaatatgaacttctcttggaggaatgaatgcaaccagtgtaaggcccctaaaccagatggcccaggagggggaccaggtggctctcacatggggggtaactacggggatgatcgtcgtggtggcagaggaggcgcgatcgcaggcgccgattacaaggacgatgatgacaagggagcaccaggaagtgctggttctgctgctggtagtggagcatcgatagagcagaagctgatctcagaggaggacctgatcgaaggccgccatatgctagcctccaaaaccatcgttctttcggtcggcgaggctactcgcactctgactgagatccagtccaccgcagaccgtcagatcttcgaagagaaggtcgggcctctggtgggtcggctgcgcctcacggcttcgctccgtcaaaacggagccaagaccgcgtatcgcgtcaacctaaaactggatcaggcggacgtcgttgattccggacttccgaaagtgcgctacactcaggtatggtcgcacgacgtgacaatcgttgcgaatagcaccgaggcctcgcgcaaatcgttgtacgatttgaccaagtccctcgtcgcgacctcgcaggtcgaagatcttgtcgtcaaccttgtgccgctgggccgtgcggatccgctagccggtgctcctggttcagcaggaagcgcagcaggatcaggtgcgtgcccggtgccgctgcagctgccgccgctggaacgcctgaccctggatgacaaaaaaccgctgaataccctgatctctgctactggtctgtggatgagtcgtaccggaaccattcataaaatcaaacaccacgaggttagccgttcgaaaatctatattgagatggcgtgtggcgatcatctggttgtgaacaatagccgctcttctcgtacagcacgtgcactgcgtcaccacaaatatcgtaaaacctgtaaacgttgccgtgtgtccgatgaggatctgaacaaattcctgacaaaagccaatgaggaccaaacaagcgtgaaagtgaaagtcgttagcgctcctacccgtactaaaaaagcaatgccgaaatccgttgctcgtgcccctaaaccactggaaaacactgaagcagcacaggcacagccgtctggaagcaaattctctccggccattcctgtttctacccaggagtccgtttctgttccagcaagtgtgagcaccagcattagcagtattagcaccggtgccaccgctagcgccctggttaaaggcaataccaatccgattacaagcatgtctgccccggttcaagcatcagctccagcactgacaaaatcccaaaccgatcgtctggaggttctgctgaatccgaaagacgaaatcagcctgaattccggcaaaccgtttcgtgaactggagagcgaactgctgtcacgtcgtaaaaaagacctgcaacaaatctatgccgaagaacgtgagaactatctggggaaactggaacgtgaaatcacccgctttttcgtggatcgtggctttctggagatcaaatccccgattctgattcctctggagtatatcgagcgtatgggcatcgacaatgataccgaactgagcaaacaaattttccgtgtggataaaaacttctgtctgcgccctatgcttgcaccaaatctgatgaactatggacgcaaactggaccgtgccctgcctgatcctatcaaaatcttcgagatcggcccgtgttatcgtaaagagtccgacggtaaagaacatctggaggagtttaccatgctgaactttacacaaatgggttcaggttgtactcgtgagaacctggaaagcatcatcaccgattttctgaaccacctgggcattgacttcaaaattgtgggcgacagctgtatggtgtatggcgacaccctggatgtcatgcacggcgacctggaactgtctagtgccgttgttggaccaattccgctggaccgtgagtggggtatcgacaaaccgtggatcggagcaggattcggtctggaacgcctgctgaaagtgaaacacgacttcaaaaacatcaaacgtgccgcccgttctgaatcgtattataacgggatctctacgaacctgtaa

SEQ ID NO: 432 - protein, 1147 aa, Artificial Sequence
  Description of Artificial Sequence: Synthetic polypeptide
  LCK::FUS::PCP::CbzRS
MGCVCSSNPEGTELASNDYTQQATQSYGAYPTQPGQGYSQQSSQPYGQQSYSGYSQSTDTSGYGQSSYSSYGQSQNTGYGTQSTPQGYGSTGGYGSSQSSQSSYGQQSSYPGYGQQPAPSSTSGSYGSSSQSSSYGQPQSGSYSQQPSYGGQQQSYGQQQSYNPPQGYGQQNQYNSSSGGGGGGGGGGNYGQDQSSMSSGGGSGGGYGNQDQSGGGGSGGYGQQDRGGRGRGGSGGGGGGGGGGYNRSSGGYEPRGRGGGRGGRGGMGGSDRGGFNKFGGPRDQGSRHDSEQDNSDNNTIFVQGLGENVTIESVADYFKQIGIIKTNKKTGQPMINLYTDRETGKLKGEATVSFDDPPSAKAAIDWFDGKEFSGNPIKVSFATRRADFNRGGGNGRGGRGRGGPMGRGGYGGGGSGGGGRGGFPSGGGGGGGQQRAGDWKCPNPTCENMNFSWRNECNQCKAPKPDGPGGGPGGSHMGGNYGDDRRGGRGGAIAGADYKDDDDKGAPGSAGSAAGSGASIEQKLISEEDLIEGRHMLASKTIVLSVGEATRTLTEIQSTADRQIFEEKVGPLVGRLRLTASLRQNGAKTAYRVNLKLDQADVVDSGLPKVRYTQVWSHDVTIVANSTEASRKSLYDLTKSLVATSQVEDLVVNLVPLGRADPLAGAPGSAGSAAGSGACPVPLQLPPLERLTLDDKKPLNTLISATGLWMSRTGTIHKIKHHEVSRSKIYIEMACGDHLVVNNSRSSRTARALRHHKYRKTCKRCRVSDEDLNKFLTKANEDQTSVKVKVVSAPTRTKKAMPKSVARAPKPLENTEAAQAQPSGSKFSPAIPVSTQESVSVPASVSTSISSISTGATASALVKGNTNPITSMSAPVQASAPALTKSQTDRLEVLLNPKDEISLNSGKPFRELESELLSRRKKDLQQIYAEERENYLGKLEREITRFFVDRGFLEIKSPILIPLEYIERMGIDNDTELSKQIFRVDKNFCLRPMLAPNLMNYGRKLDRALPDPIKIFEIGPCYRKESDGKEHLEEFTMLNFTQMGSGCTRENLESIITDFLNHLGIDFKIVGDSCMVYGDTLDVMHGDLELSSAVVGPIPLDREWGIDKPWIGAGFGLERLLKVKHDFKNIKRAARSESYYNGISTNL

SEQ ID NO: 433 - DNA, 3627 bp, Artificial Sequence
  Description of Artificial Sequence: Synthetic polynucleotide
  TOM20::FUS::CbzRS
atggtgggtcggaacagcgccatcgccgccggtgtatgcggggcccttttcattgggtactgcatctacttcgaccgcaaaagacgaagtgaccccaacttcaagaacaggcttcgagaacgaagaaagaaacagaagcttgccaaggagagagctgggctttccaagttacctgaccttaaagatgctgaagctgttcagaaattcttcatggcctcaaacgattatacccaacaagcaacccaaagctatggggcctaccccacccagcccgggcagggctattcccagcagagcagtcagccctacggacagcagagttacagtggttatagccagtccacggacacttcaggatatggccagagcagctattcttcttatggccagagccagaacacaggctatggaactcagtcaactccccagggatatggctcgactggcggctatggcagtagccagagctcccaatcgtcttacgggcagcagtcctcctaccctggctatggccagcagccagctcccagcagcacctcgggaagttacggtagcagttctcagagcagcagctatgggcagccccagagtgggagctacagccagcagcctagctatggtggacagcagcaaagctatggacagcagcaaagctataatccccctcagggctatggacagcagaaccagtacaacagcagcagtggtggtggaggtggaggtggaggtggaggtaactatggccaagatcaatcctccatgagtagtggtggtggcagtggtggcggttatggcaatcaagaccagagtggtggaggtggcagcggtggctatggacagcaggaccgtggaggccgcggcaggggtggcagtggtggcggcggcggcggcggcggtggtggttacaaccgcagcagtggtggctatgaacccagaggtcgtggaggtggccgtggaggcagaggtggcatgggcggaagtgaccgtggtggcttcaataaatttggtggccctcgggaccaaggatcacgtcatgactccgaacaggataattcagacaacaacaccatctttgtgcaaggcctgggtgagaatgttacaattgagtctgtggctgattacttcaagcagattggtattattaagacaaacaagaaaacgggacagcccatgattaatttgtacacagacagggaaactggcaagctgaagggagaggcaacggtctcttttgatgacccaccttcagctaaagcagctattgactggtttgatggtaaagaattctccggaaatcctatcaaggtctcatttgctactcgccgggcagactttaatcggggtggtggcaatggtcgtggaggccgagggcgaggaggacccatgggccgtggaggctatggaggtggtggcagtggtggtggtggccgaggaggatttcccagtggaggtggtggcggtggaggacagcagcgagctggtgactggaagtgtcctaatcccacctgtgagaatatgaacttctcttggaggaatgaatgcaaccagtgtaaggcccctaaaccagatggcccaggagggggaccaggtggctctcacatggggggtaactacggggatgatcgtcgtggtggcagaggaggcgcgatcgcaggcaagcctattcccaaccccctgctgggcctggatagcaccggagcaccaggaagtgctggttctgctgctggtagtggagcatcgatagagcagaagctgatctcagaggaggacctgatcgaaggccgccatatgctagcctccaaaaccatcgttctttcggtcggcgaggctactcgcactctgactgagatccagtccaccgcagaccgtcagatcttcgaagagaaggtcgggcctctggtgggtcggctgcgcctcacggcttcgctccgtcaaaacggagccaagaccgcgtatcgcgtcaacctaaaactggatcaggcggacgtcgttgattccggacttccgaaagtgcgctacactcaggtatggtcgcacgacgtgacaatcgttgcgaatagcaccgaggcctcgcgcaaatcgttgtacgatttgaccaagtccctcgtcgcgacctcgcaggtcgaagatcttgtcgtcaaccttgtgccgctgggccgtgcggatccgctagccggtgctcctggttcagcaggaagcgcagcaggatcaggtgcgtgcccggtgccgctgcagctgccgccgctggaacgcctgaccctggatgacaaaaaaccgctgaataccctgatctctgctactggtctgtggatgagtcgtaccggaaccattcataaaatcaaacaccacgaggttagccgttcgaaaatctatattgagatggcgtgtggcgatcatctggttgtgaacaatagccgctcttctcgtacagcacgtgcactgcgtcaccacaaatatcgtaaaacctgtaaacgttgccgtgtgtccgatgaggatctgaacaaattcctgacaaaagccaatgaggaccaaacaagcgtgaaagtgaaagtcgttagcgctcctacccgtactaaaaaagcaatgccgaaatccgttgctcgtgcccctaaaccactggaaaacactgaagcagcacaggcacagccgtctggaagcaaattctctccggccattcctgtttctacccaggagtccgtttctgttccagcaagtgtgagcaccagcattagcagtattagcaccggtgccaccgctagcgccctggttaaaggcaataccaatccgattacaagcatgtctgccccggttcaagcatcagctccagcactgacaaaatcccaaaccgatcgtctggaggttctgctgaatccgaaagacgaaatcagcctgaattccggcaaaccgtttcgtgaactggagagcgaactgctgtcacgtcgtaaaaaagacctgcaacaaatctatgccgaagaacgtgagaactatctggggaaactggaacgtgaaatcacccgctttttcgtggatcgtggctttctggagatcaaatccccgattctgattcctctggagtatatcgagcgtatgggcatcgacaatgataccgaactgagcaaacaaattttccgtgtggataaaaacttctgtctgcgccctatgcttgcaccaaatctgatgaactatggacgcaaactggaccgtgccctgcctgatcctatcaaaatcttcgagatcggcccgtgttatcgtaaagagtccgacggtaaagaacatctggaggagtttaccatgctgaactttacacaaatgggttcaggttgtactcgtgagaacctggaaagcatcatcaccgattttctgaaccacctgggcattgacttcaaaattgtgggcgacagctgtatggtgtatggcgacaccctggatgtcatgcacggcgacctggaactgtctagtgccgttgttggaccaattccgctggaccgtgagtggggtatcgacaaaccgtggatcggagcaggattcggtctggaacgcctgctgaaagtgaaacacgacttcaaaaacatcaaacgtgccgcccgttctgaatcgtattataacgggatctctacgaacctgtaa

SEQ ID NO: 434 - protein, 1208 aa, Artificial Sequence
  Description of Artificial Sequence: Synthetic polypeptide
  TOM20::FUS::CbzRS
MVGRNSAIAAGVCGALFIGYCIYFDRKRRSDPNFKNRLRERRKKQKLAKERAGLSKLPDLKDAEAVQKFFMASNDYTQQATQSYGAYPTQPGQGYSQQSSQPYGQQSYSGYSQSTDTSGYGQSSYSSYGQSQNTGYGTQSTPQGYGSTGGYGSSQSSQSSYGQQSSYPGYGQQPAPSSTSGSYGSSSQSSSYGQPQSGSYSQQPSYGGQQQSYGQQQSYNPPQGYGQQNQYNSSSGGGGGGGGGGNYGQDQSSMSSGGGSGGGYGNQDQSGGGGSGGYGQQDRGGRGRGGSGGGGGGGGGGYNRSSGGYEPRGRGGGRGGRGGMGGSDRGGFNKFGGPRDQGSRHDSEQDNSDNNTIFVQGLGENVTIESVADYFKQIGIIKTNKKTGQPMINLYTDRETGKLKGEATVSFDDPPSAKAAIDWFDGKEFSGNPIKVSFATRRADFNRGGGNGRGGRGRGGPMGRGGYGGGGSGGGGRGGFPSGGGGGGGQQRAGDWKCPNPTCENMNFSWRNECNQCKAPKPDGPGGGPGGSHMGGNYGDDRRGGRGGAIAGKPIPNPLLGLDSTGAPGSAGSAAGSGASIEQKLISEEDLIEGRHMLASKTIVLSVGEATRTLTEIQSTADRQIFEEKVGPLVGRLRLTASLRQNGAKTAYRVNLKLDQADVVDSGLPKVRYTQVWSHDVTIVANSTEASRKSLYDLTKSLVATSQVEDLVVNLVPLGRADPLAGAPGSAGSAAGSGACPVPLQLPPLERLTLDDKKPLNTLISATGLWMSRTGTIHKIKHHEVSRSKIYIEMACGDHLVVNNSRSSRTARALRHHKYRKTCKRCRVSDEDLNKFLTKANEDQTSVKVKVVSAPTRTKKAMPKSVARAPKPLENTEAAQAQPSGSKFSPAIPVSTQESVSVPASVSTSISSISTGATASALVKGNTNPITSMSAPVQASAPALTKSQTDRLEVLLNPKDEISLNSGKPFRELESELLSRRKKDLQQIYAEERENYLGKLEREITRFFVDRGFLEIKSPILIPLEYIERMGIDNDTELSKQIFRVDKNFCLRPMLAPNLMNYGRKLDRALPDPIKIFEIGPCYRKESDGKEHLEEFTMLNFTQMGSGCTRENLESIITDFLNHLGIDFKIVGDSCMVYGDTLDVMHGDLELSSAVVGPIPLDREWGIDKPWIGAGFGLERLLKVKHDFKNIKRAARSESYYNGISTNL

SEQ ID NO: 435 - DNA, 4005 bp, Artificial Sequence
  Description of Artificial Sequence: Synthetic polynucleotide
  TOM20::FUS::2xPCP::CbzRS
atggtgggtcggaacagcgccatcgccgccggtgtatgcggggcccttttcattgggtactgcatctacttcgaccgcaaaagacgaagtgaccccaacttcaagaacaggcttcgagaacgaagaaagaaacagaagcttgccaaggagagagctgggctttccaagttacctgaccttaaagatgctgaagctgttcagaaattcttcatggcctcaaacgattatacccaacaagcaacccaaagctatggggcctaccccacccagcccgggcagggctattcccagcagagcagtcagccctacggacagcagagttacagtggttatagccagtccacggacacttcaggatatggccagagcagctattcttcttatggccagagccagaacacaggctatggaactcagtcaactccccagggatatggctcgactggcggctatggcagtagccagagctcccaatcgtcttacgggcagcagtcctcctaccctggctatggccagcagccagctcccagcagcacctcgggaagttacggtagcagttctcagagcagcagctatgggcagccccagagtgggagctacagccagcagcctagctatggtggacagcagcaaagctatggacagcagcaaagctataatccccctcagggctatggacagcagaaccagtacaacagcagcagtggtggtggaggtggaggtggaggtggaggtaactatggccaagatcaatcctccatgagtagtggtggtggcagtggtggcggttatggcaatcaagaccagagtggtggaggtggcagcggtggctatggacagcaggaccgtggaggccgcggcaggggtggcagtggtggcggcggcggcggcggcggtggtggttacaaccgcagcagtggtggctatgaacccagaggtcgtggaggtggccgtggaggcagaggtggcatgggcggaagtgaccgtggtggcttcaataaatttggtggccctcgggaccaaggatcacgtcatgactccgaacaggataattcagacaacaacaccatctttgtgcaaggcctgggtgagaatgttacaattgagtctgtggctgattacttcaagcagattggtattattaagacaaacaagaaaacgggacagcccatgattaatttgtacacagacagggaaactggcaagctgaagggagaggcaacggtctcttttgatgacccaccttcagctaaagcagctattgactggtttgatggtaaagaattctccggaaatcctatcaaggtctcatttgctactcgccgggcagactttaatcggggtggtggcaatggtcgtggaggccgagggcgaggaggacccatgggccgtggaggctatggaggtggtggcagtggtggtggtggccgaggaggatttcccagtggaggtggtggcggtggaggacagcagcgagctggtgactggaagtgtcctaatcccacctgtgagaatatgaacttctcttggaggaatgaatgcaaccagtgtaaggcccctaaaccagatggcccaggagggggaccaggtggctctcacatggggggtaactacggggatgatcgtcgtggtggcagaggaggcgcgatcgcaggcaagcctattcccaaccccctgctgggcctggatagcaccggagcaccaggaagtgctggttctgctgctggtagtggagcatcgatagagcagaagctgatctcagaggaggacctgatcgaaggccgccatatgctagcctccaaaaccatcgttctttcggtcggcgaggctactcgcactctgactgagatccagtccaccgcagaccgtcagatcttcgaagagaaggtcgggcctctggtgggtcggctgcgcctcacggcttcgctccgtcaaaacggagccaagaccgcgtatcgcgtcaacctaaaactggatcaggcggacgtcgttgattccggacttccgaaagtgcgctacactcaggtatggtcgcacgacgtgacaatcgttgcgaatagcaccgaggcctcgcgcaaatcgttgtacgatttgaccaagtccctcgtcgcgacctcgcaggtcgaagatcttgtcgtcaaccttgtgccgctgggccgtgcggatccgctagcctccaaaaccatcgttctttcggtcggcgaggctactcgcactctgactgagatccagtccaccgcagaccgtcagatcttcgaagagaaggtcgggcctctggtgggtcggctgcgcctcacggcttcgctccgtcaaaacggagccaagaccgcgtatcgcgtcaacctaaaactggatcaggcggacgtcgttgattccggacttccgaaagtgcgctacactcaggtatggtcgcacgacgtgacaatcgttgcgaatagcaccgaggcctcgcgcaaatcgttgtacgatttgaccaagtccctcgtcgcgacctcgcaggtcgaagatcttgtcgtcaaccttgtgccgctgggccgtccaccggtcgccaccggtgctcctggttcagcaggaagcgcagcaggatcaggtgcgtgcccggtgccgctgcagctgccgccgctggaacgcctgaccctggatgacaaaaaaccgctgaataccctgatctctgctactggtctgtggatgagtcgtaccggaaccattcataaaatcaaacaccacgaggttagccgttcgaaaatctatattgagatggcgtgtggcgatcatctggttgtgaacaatagccgctcttctcgtacagcacgtgcactgcgtcaccacaaatatcgtaaaacctgtaaacgttgccgtgtgtccgatgaggatctgaacaaattcctgacaaaagccaatgaggaccaaacaagcgtgaaagtgaaagtcgttagcgctcctacccgtactaaaaaagcaatgccgaaatccgttgctcgtgcccctaaaccactggaaaacactgaagcagcacaggcacagccgtctggaagcaaattctctccggccattcctgtttctacccaggagtccgtttctgttccagcaagtgtgagcaccagcattagcagtattagcaccggtgccaccgctagcgccctggttaaaggcaataccaatccgattacaagcatgtctgccccggttcaagcatcagctccagcactgacaaaatcccaaaccgatcgtctggaggttctgctgaatccgaaagacgaaatcagcctgaattccggcaaaccgtttcgtgaactggagagcgaactgctgtcacgtcgtaaaaaagacctgcaacaaatctatgccgaagaacgtgagaactatctggggaaactggaacgtgaaatcacccgctttttcgtggatcgtggctttctggagatcaaatccccgattctgattcctctggagtatatcgagcgtatgggcatcgacaatgataccgaactgagcaaacaaattttccgtgtggataaaaacttctgtctgcgccctatgcttgcaccaaatctgatgaactatggacgcaaactggaccgtgccctgcctgatcctatcaaaatcttcgagatcggcccgtgttatcgtaaagagtccgacggtaaagaacatctggaggagtttaccatgctgaactttacacaaatgggttcaggttgtactcgtgagaacctggaaagcatcatcaccgattttctgaaccacctgggcattgacttcaaaattgtgggcgacagctgtatggtgtatggcgacaccctggatgtcatgcacggcgacctggaactgtctagtgccgttgttggaccaattccgctggaccgtgagtggggtatcgacaaaccgtggatcggagcaggattcggtctggaacgcctgctgaaagtgaaacacgacttcaaaaacatcaaacgtgccgcccgttctgaatcgtattataacgggatctctacgaacctgtaa

SEQ ID NO: 436 - protein, 1334 aa, Artificial Sequence
  Description of Artificial Sequence: Synthetic polypeptide
  TOM20::FUS::2xPCP::CbzRS
MVGRNSAIAAGVCGALFIGYCIYFDRKRRSDPNFKNRLRERRKKQKLAKERAGLSKLPDLKDAEAVQKFFMASNDYTQQATQSYGAYPTQPGQGYSQQSSQPYGQQSYSGYSQSTDTSGYGQSSYSSYGQSQNTGYGTQSTPQGYGSTGGYGSSQSSQSSYGQQSSYPGYGQQPAPSSTSGSYGSSSQSSSYGQPQSGSYSQQPSYGGQQQSYGQQQSYNPPQGYGQQNQYNSSSGGGGGGGGGGNYGQDQSSMSSGGGSGGGYGNQDQSGGGGSGGYGQQDRGGRGRGGSGGGGGGGGGGYNRSSGGYEPRGRGGGRGGRGGMGGSDRGGFNKFGGPRDQGSRHDSEQDNSDNNTIFVQGLGENVTIESVADYFKQIGIIKTNKKTGQPMINLYTDRETGKLKGEATVSFDDPPSAKAAIDWFDGKEFSGNPIKVSFATRRADFNRGGGNGRGGRGRGGPMGRGGYGGGGSGGGGRGGFPSGGGGGGGQQRAGDWKCPNPTCENMNFSWRNECNQCKAPKPDGPGGGPGGSHMGGNYGDDRRGGRGGAIAGKPIPNPLLGLDSTGAPGSAGSAAGSGASIEQKLISEEDLIEGRHMLASKTIVLSVGEATRTLTEIQSTADRQIFEEKVGPLVGRLRLTASLRQNGAKTAYRVNLKLDQADVVDSGLPKVRYTQVWSHDVTIVANSTEASRKSLYDLTKSLVATSQVEDLVVNLVPLGRADPLASKTIVLSVGEATRTLTEIQSTADRQIFEEKVGPLVGRLRLTASLRQNGAKTAYRVNLKLDQADVVDSGLPKVRYTQVWSHDVTIVANSTEASRKSLYDLTKSLVATSQVEDLVVNLVPLGRPPVATGAPGSAGSAAGSGACPVPLQLPPLERLTLDDKKPLNTLISATGLWMSRTGTIHKIKHHEVSRSKIYIEMACGDHLVVNNSRSSRTARALRHHKYRKTCKRCRVSDEDLNKFLTKANEDQTSVKVKVVSAPTRTKKAMPKSVARAPKPLENTEAAQAQPSGSKFSPAIPVSTQESVSVPASVSTSISSISTGATASALVKGNTNPITSMSAPVQASAPALTKSQTDRLEVLLNPKDEISLNSGKPFRELESELLSRRKKDLQQIYAEERENYLGKLEREITRFFVDRGFLEIKSPILIPLEYIERMGIDNDTELSKQIFRVDKNFCLRPMLAPNLMNYGRKLDRALPDPIKIFEIGPCYRKESDGKEHLEEFTMLNFTQMGSGCTRENLESIITDFLNHLGIDFKIVGDSCMVYGDTLDVMHGDLELSSAVVGPIPLDREWGIDKPWIGAGFGLERLLKVKHDFKNIKRAARSESYYNGISTNL

SEQ ID NO: 437 - DNA, 3714 bp, Artificial Sequence
  Description of Artificial Sequence: Synthetic polynucleotide
  TOM20::FUS::4xlambdaN22::CbzRS
atggtgggtcggaacagcgccatcgccgccggtgtatgcggggcccttttcattgggtactgcatctacttcgaccgcaaaagacgaagtgaccccaacttcaagaacaggcttcgagaacgaagaaagaaacagaagcttgccaaggagagagctgggctttccaagttacctgaccttaaagatgctgaagctgttcagaaattcttcatggcctcaaacgattatacccaacaagcaacccaaagctatggggcctaccccacccagcccgggcagggctattcccagcagagcagtcagccctacggacagcagagttacagtggttatagccagtccacggacacttcaggatatggccagagcagctattcttcttatggccagagccagaacacaggctatggaactcagtcaactccccagggatatggctcgactggcggctatggcagtagccagagctcccaatcgtcttacgggcagcagtcctcctaccctggctatggccagcagccagctcccagcagcacctcgggaagttacggtagcagttctcagagcagcagctatgggcagccccagagtgggagctacagccagcagcctagctatggtggacagcagcaaagctatggacagcagcaaagctataatccccctcagggctatggacagcagaaccagtacaacagcagcagtggtggtggaggtggaggtggaggtggaggtaactatggccaagatcaatcctccatgagtagtggtggtggcagtggtggcggttatggcaatcaagaccagagtggtggaggtggcagcggtggctatggacagcaggaccgtggaggccgcggcaggggtggcagtggtggcggcggcggcggcggcggtggtggttacaaccgcagcagtggtggctatgaacccagaggtcgtggaggtggccgtggaggcagaggtggcatgggcggaagtgaccgtggtggcttcaataaatttggtggccctcgggaccaaggatcacgtcatgactccgaacaggataattcagacaacaacaccatctttgtgcaaggcctgggtgagaatgttacaattgagtctgtggctgattacttcaagcagattggtattattaagacaaacaagaaaacgggacagcccatgattaatttgtacacagacagggaaactggcaagctgaagggagaggcaacggtctcttttgatgacccaccttcagctaaagcagctattgactggtttgatggtaaagaattctccggaaatcctatcaaggtctcatttgctactcgccgggcagactttaatcggggtggtggcaatggtcgtggaggccgagggcgaggaggacccatgggccgtggaggctatggaggtggtggcagtggtggtggtggccgaggaggatttcccagtggaggtggtggcggtggaggacagcagcgagctggtgactggaagtgtcctaatcccacctgtgagaatatgaacttctcttggaggaatgaatgcaaccagtgtaaggcccctaaaccagatggcccaggagggggaccaggtggctctcacatggggggtaactacggggatgatcgtcgtggtggcagaggaggcgcgatcgcaggcaagcctattcccaaccccctgctgggcctggatagcaccggagcaccaggaagtgctggttctgctgctggtagtggagcatcgatagagcagaagctgatctcagaggaggacctgctagccaccatggacgcacaaacacgacgacgtgagcgtcgcgctgagaaacaagctcaatggaaagctgcaaacccaccgctcgacggagccggagctggcgctggagctggagccggagctggcggtctagccaccatggacgcacaaacacgacgacgtgagcgtcgcgctgagaaacaagctcaatggaaagctgcaaacccaccgctcgacggagccggagctggcgctggagctggagccggagctggcggtctagccaccatggacgcacaaacacgacgacgtgagcgtcgcgctgagaaacaagctcaatggaaagctgcaaacccaccgctcgacggagccggagctggcgctggagctggagccggagctggcggtctagccaccatggacgcacaaacacgacgacgtgagcgtcgcgctgagaaacaagctcaatggaaagctgcaaacccaccgctcgagtctagagggcccgttggtgctcctggttcagcaggaagcgcagcaggatcaggtgcgtgcccggtgccgctgcagctgccgccgctggaacgcctgaccctggatgacaaaaaaccgctgaataccctgatctctgctactggtctgtggatgagtcgtaccggaaccattcataaaatcaaacaccacgaggttagccgttcgaaaatctatattgagatggcgtgtggcgatcatctggttgtgaacaatagccgctcttctcgtacagcacgtgcactgcgtcaccacaaatatcgtaaaacctgtaaacgttgccgtgtgtccgatgaggatctgaacaaattcctgacaaaagccaatgaggaccaaacaagcgtgaaagtgaaagtcgttagcgctcctacccgtactaaaaaagcaatgccgaaatccgttgctcgtgcccctaaaccactggaaaacactgaagcagcacaggcacagccgtctggaagcaaattctctccggccattcctgtttctacccaggagtccgtttctgttccagcaagtgtgagcaccagcattagcagtattagcaccggtgccaccgctagcgccctggttaaaggcaataccaatccgattacaagcatgtctgccccggttcaagcatcagctccagcactgacaaaatcccaaaccgatcgtctggaggttctgctgaatccgaaagacgaaatcagcctgaattccggcaaaccgtttcgtgaactggagagcgaactgctgtcacgtcgtaaaaaagacctgcaacaaatctatgccgaagaacgtgagaactatctggggaaactggaacgtgaaatcacccgctttttcgtggatcgtggctttctggagatcaaatccccgattctgattcctctggagtatatcgagcgtatgggcatcgacaatgataccgaactgagcaaacaaattttccgtgtggataaaaacttctgtctgcgccctatgcttgcaccaaatctgatgaactatggacgcaaactggaccgtgccctgcctgatcctatcaaaatcttcgagatcggcccgtgttatcgtaaagagtccgacggtaaagaacatctggaggagtttaccatgctgaactttacacaaatgggttcaggttgtactcgtgagaacctggaaagcatcatcaccgattttctgaaccacctgggcattgacttcaaaattgtgggcgacagctgtatggtgtatggcgacaccctggatgtcatgcacggcgacctggaactgtctagtgccgttgttggaccaattccgctggaccgtgagtggggtatcgacaaaccgtggatcggagcaggattcggtctggaacgcctgctgaaagtgaaacacgacttcaaaaacatcaaacgtgccgcccgttctgaatcgtattataacgggatctctacgaacctgtaa

SEQ ID NO: 438 - protein, 1237 aa, Artificial Sequence
  Description of Artificial Sequence: Synthetic polypeptide
  TOM20::FUS::4xlambdaN22::CbzRS
MVGRNSAIAAGVCGALFIGYCIYFDRKRRSDPNFKNRLRERRKKQKLAKERAGLSKLPDLKDAEAVQKFFMASNDYTQQATQSYGAYPTQPGQGYSQQSSQPYGQQSYSGYSQSTDTSGYGQSSYSSYGQSQNTGYGTQSTPQGYGSTGGYGSSQSSQSSYGQQSSYPGYGQQPAPSSTSGSYGSSSQSSSYGQPQSGSYSQQPSYGGQQQSYGQQQSYNPPQGYGQQNQYNSSSGGGGGGGGGGNYGQDQSSMSSGGGSGGGYGNQDQSGGGGSGGYGQQDRGGRGRGGSGGGGGGGGGGYNRSSGGYEPRGRGGGRGGRGGMGGSDRGGFNKFGGPRDQGSRHDSEQDNSDNNTIFVQGLGENVTIESVADYFKQIGIIKTNKKTGQPMINLYTDRETGKLKGEATVSFDDPPSAKAAIDWFDGKEFSGNPIKVSFATRRADFNRGGGNGRGGRGRGGPMGRGGYGGGGSGGGGRGGFPSGGGGGGGQQRAGDWKCPNPTCENMNFSWRNECNQCKAPKPDGPGGGPGGSHMGGNYGDDRRGGRGGAIAGKPIPNPLLGLDSTGAPGSAGSAAGSGASIEQKLISEEDLLATMDAQTRRRERRAEKQAQWKAANPPLDGAGAGAGAGAGAGGLATMDAQTRRRERRAEKQAQWKAANPPLDGAGAGAGAGAGAGGLATMDAQTRRRERRAEKQAQWKAANPPLDGAGAGAGAGAGAGGLATMDAQTRRRERRAEKQAQWKAANPPLESRGPVGAPGSAGSAAGSGACPVPLQLPPLERLTLDDKKPLNTLISATGLWMSRTGTIHKIKHHEVSRSKIYIEMACGDHLVVNNSRSSRTARALRHHKYRKTCKRCRVSDEDLNKFLTKANEDQTSVKVKVVSAPTRTKKAMPKSVARAPKPLENTEAAQAQPSGSKFSPAIPVSTQESVSVPASVSTSISSISTGATASALVKGNTNPITSMSAPVQASAPALTKSQTDRLEVLLNPKDEISLNSGKPFRELESELLSRRKKDLQQIYAEERENYLGKLEREITRFFVDRGFLEIKSPILIPLEYIERMGIDNDTELSKQIFRVDKNFCLRPMLAPNLMNYGRKLDRALPDPIKIFEIGPCYRKESDGKEHLEEFTMLNFTQMGSGCTRENLESIITDFLNHLGIDFKIVGDSCMVYGDTLDVMHGDLELSSAVVGPIPLDREWGIDKPWIGAGFGLERLLKVKHDFKNIKRAARSESYYNGISTNL

SEQ ID NO: 439 - DNA, 3531 bp, Artificial Sequence
  Description of Artificial Sequence: Synthetic polynucleotide
  EBAG91-29::FUS::PCP::PylRS(AF)
atggccatcacccagtttcggttatttaaattttgtacctgcctagcaacagtattctcattcctaaagagattaatatgcagatctggagcacccggctccgccggctccgccgccggctccggcatggcctcaaacgattatacccaacaagcaacccaaagctatggggcctaccccacccagcccgggcagggctattcccagcagagcagtcagccctacggacagcagagttacagtggttatagccagtccacggacacttcaggatatggccagagcagctattcttcttatggccagagccagaacacaggctatggaactcagtcaactccccagggatatggctcgactggcggctatggcagtagccagagctcccaatcgtcttacgggcagcagtcctcctaccctggctatggccagcagccagctcccagcagcacctcgggaagttacggtagcagttctcagagcagcagctatgggcagccccagagtgggagctacagccagcagcctagctatggtggacagcagcaaagctatggacagcagcaaagctataatccccctcagggctatggacagcagaaccagtacaacagcagcagtggtggtggaggtggaggtggaggtggaggtaactatggccaagatcaatcctccatgagtagtggtggtggcagtggtggcggttatggcaatcaagaccagagtggtggaggtggcagcggtggctatggacagcaggaccgtggaggccgcggcaggggtggcagtggtggcggcggcggcggcggcggtggtggttacaaccgcagcagtggtggctatgaacccagaggtcgtggaggtggccgtggaggcagaggtggcatgggcggaagtgaccgtggtggcttcaataaatttggtggccctcgggaccaaggatcacgtcatgactccgaacaggataattcagacaacaacaccatctttgtgcaaggcctgggtgagaatgttacaattgagtctgtggctgattacttcaagcagattggtattattaagacaaacaagaaaacgggacagcccatgattaatttgtacacagacagggaaactggcaagctgaagggagaggcaacggtctcttttgatgacccaccttcagctaaagcagctattgactggtttgatggtaaagaattctccggaaatcctatcaaggtctcatttgctactcgccgggcagactttaatcggggtggtggcaatggtcgtggaggccgagggcgaggaggacccatgggccgtggaggctatggaggtggtggcagtggtggtggtggccgaggaggatttcccagtggaggtggtggcggtggaggacagcagcgagctggtgactggaagtgtcctaatcccacctgtgagaatatgaacttctcttggaggaatgaatgcaaccagtgtaaggcccctaaaccagatggcccaggagggggaccaggtggctctcacatggggggtaactacggggatgatcgtcgtggtggcagaggtggtgcgatcgcaggcgccgattacaaggacgatgatgacaagggagcaccaggaagtgctggttctgctgctggtagtggagcatcgatagagcagaagctgatctcagaggaggacctgatcgaaggccgccatatgctagcctccaaaaccatcgttctttcggtcggcgaggctactcgcactctgactgagatccagtccaccgcagaccgtcagatcttcgaagagaaggtcgggcctctggtgggtcggctgcgcctcacggcttcgctccgtcaaaacggagccaagaccgcgtatcgcgtcaacctaaaactggatcaggcggacgtcgttgattccggacttccgaaagtgcgctacactcaggtatggtcgcacgacgtgacaatcgttgcgaatagcaccgaggcctcgcgcaaatcgttgtacgatttgaccaagtccctcgtcgcgacctcgcaggtcgaagatcttgtcgtcaaccttgtgccgctgggccgtgcggatccgctagccggtgctcctggttcagcaggaagcgcagcaggatcaggtgcgtgcccggtgccgctgcagctgccgccgctggaacgcctgaccctggatgataaaaaaccgctgaataccctgatctctgctactggtctgtggatgagtcgtaccggaaccattcataaaatcaaacaccacgaggttagccgttcgaaaatctatattgagatggcgtgtggcgatcatctggttgtgaacaatagccgctcttctcgtacagcacgtgcactgcgtcaccacaaatatcgtaaaacctgtaaacgttgccgtgtgtccgatgaggatctgaacaaattcctgacaaaagccaatgaggaccaaacaagcgtgaaagtgaaagtcgttagcgctcctacccgtactaaaaaagcaatgccgaaatccgttgctcgtgcccctaaaccactggaaaacactgaagcagcacaggcacagccgtctggaagcaaattctctccggccattcctgtttctacccaggagtccgtttctgttccagcaagtgtgagcaccagcattagcagtattagcaccggtgccaccgctagcgccctggttaaaggcaataccaatccgattacaagcatgtctgccccggttcaagcatcagctccagcactgacaaaatcccaaaccgatcgtctggaggttctgctgaatccgaaagacgaaatcagcctgaattccggcaaaccgtttcgtgaactggagagcgaactgctgtcacgtcgtaaaaaagacctgcaacaaatctatgccgaagaacgtgagaactatctggggaaactggaacgtgaaatcacccgctttttcgtggatcgtggctttctggagatcaaatccccgattctgattcctctggagtatatcgagcgtatgggcatcgacaatgataccgaactgagcaaacaaattttccgtgtggataaaaacttctgtctgcgccctatgctagcaccaaatctggctaactatctgcgcaaactggaccgtgccctgcctgatcctatcaaaatcttcgagatcggcccgtgttatcgtaaagagtccgacggtaaagaacatctggaggagtttaccatgctgaacttttgccaaatgggttcaggttgtactcgtgagaacctggaaagcatcatcaccgattttctgaaccacctgggcattgacttcaaaattgtgggcgacagctgtatggtgtttggcgacaccctggatgtcatgcacggcgacctggaactgtctagtgccgttgtgggcccaatcccgctggatcgtgagtggggtatcgacaaaccttggatcggtgcgggttttggtctggagcgtctgctgaaagtaaaacacgacttcaagaacatcaaacgtgctgcacgttccgagtcctattacaatggtatttctactaacctgtaa

SEQ ID NO: 440 - protein, 1176 aa, Artificial Sequence
  Description of Artificial Sequence: Synthetic polypeptide
  EBAG91-29::FUS::PCP::PylRS(AF)
MAITQFRLFKFCTCLATVFSFLKRLICRSGAPGSAGSAAGSGMASNDYTQQATQSYGAYPTQPGQGYSQQSSQPYGQQSYSGYSQSTDTSGYGQSSYSSYGQSQNTGYGTQSTPQGYGSTGGYGSSQSSQSSYGQQSSYPGYGQQPAPSSTSGSYGSSSQSSSYGQPQSGSYSQQPSYGGQQQSYGQQQSYNPPQGYGQQNQYNSSSGGGGGGGGGGNYGQDQSSMSSGGGSGGGYGNQDQSGGGGSGGYGQQDRGGRGRGGSGGGGGGGGGGYNRSSGGYEPRGRGGGRGGRGGMGGSDRGGFNKFGGPRDQGSRHDSEQDNSDNNTIFVQGLGENVTIESVADYFKQIGIIKTNKKTGQPMINLYTDRETGKLKGEATVSFDDPPSAKAAIDWFDGKEFSGNPIKVSFATRRADFNRGGGNGRGGRGRGGPMGRGGYGGGGSGGGGRGGFPSGGGGGGGQQRAGDWKCPNPTCENMNFSWRNECNQCKAPKPDGPGGGPGGSHMGGNYGDDRRGGRGGAIAGADYKDDDDKGAPGSAGSAAGSGASIEQKLISEEDLIEGRHMLASKTIVLSVGEATRTLTEIQSTADRQIFEEKVGPLVGRLRLTASLRQNGAKTAYRVNLKLDQADVVDSGLPKVRYTQVWSHDVTIVANSTEASRKSLYDLTKSLVATSQVEDLVVNLVPLGRADPLAGAPGSAGSAAGSGACPVPLQLPPLERLTLDDKKPLNTLISATGLWMSRTGTIHKIKHHEVSRSKIYIEMACGDHLVVNNSRSSRTARALRHHKYRKTCKRCRVSDEDLNKFLTKANEDQTSVKVKVVSAPTRTKKAMPKSVARAPKPLENTEAAQAQPSGSKFSPAIPVSTQESVSVPASVSTSISSISTGATASALVKGNTNPITSMSAPVQASAPALTKSQTDRLEVLLNPKDEISLNSGKPFRELESELLSRRKKDLQQIYAEERENYLGKLEREITRFFVDRGFLEIKSPILIPLEYIERMGIDNDTELSKQIFRVDKNFCLRPMLAPNLANYLRKLDRALPDPIKIFEIGPCYRKESDGKEHLEEFTMLNFCQMGSGCTRENLESIITDFLNHLGIDFKIVGDSCMVFGDTLDVMHGDLELSSAVVGPIPLDREWGIDKPWIGAGFGLERLLKVKHDFKNIKRAARSESYYNGISTNL

SEQ ID NO: 441 - DNA, 3618 bp, Artificial Sequence
  Description of Artificial Sequence: Synthetic polynucleotide
  EBAG91-29::FUS::4xlambdaN22::IFRS1
atggccatcacccagtttcggttatttaaattttgtacctgcctagcaacagtattctcattcctaaagagattaatatgcagatctggagcacccggctccgccggctccgccgccggctccggcatggcctcaaacgattatacccaacaagcaacccaaagctatggggcctaccccacccagcccgggcagggctattcccagcagagcagtcagccctacggacagcagagttacagtggttatagccagtccacggacacttcaggatatggccagagcagctattcttcttatggccagagccagaacacaggctatggaactcagtcaactccccagggatatggctcgactggcggctatggcagtagccagagctcccaatcgtcttacgggcagcagtcctcctaccctggctatggccagcagccagctcccagcagcacctcgggaagttacggtagcagttctcagagcagcagctatgggcagccccagagtgggagctacagccagcagcctagctatggtggacagcagcaaagctatggacagcagcaaagctataatccccctcagggctatggacagcagaaccagtacaacagcagcagtggtggtggaggtggaggtggaggtggaggtaactatggccaagatcaatcctccatgagtagtggtggtggcagtggtggcggttatggcaatcaagaccagagtggtggaggtggcagcggtggctatggacagcaggaccgtggaggccgcggcaggggtggcagtggtggcggcggcggcggcggcggtggtggttacaaccgcagcagtggtggctatgaacccagaggtcgtggaggtggccgtggaggcagaggtggcatgggcggaagtgaccgtggtggcttcaataaatttggtggccctcgggaccaaggatcacgtcatgactccgaacaggataattcagacaacaacaccatctttgtgcaaggcctgggtgagaatgttacaattgagtctgtggctgattacttcaagcagattggtattattaagacaaacaagaaaacgggacagcccatgattaatttgtacacagacagggaaactggcaagctgaagggagaggcaacggtctcttttgatgacccaccttcagctaaagcagctattgactggtttgatggtaaagaattctccggaaatcctatcaaggtctcatttgctactcgccgggcagactttaatcggggtggtggcaatggtcgtggaggccgagggcgaggaggacccatgggccgtggaggctatggaggtggtggcagtggtggtggtggccgaggaggatttcccagtggaggtggtggcggtggaggacagcagcgagctggtgactggaagtgtcctaatcccacctgtgagaatatgaacttctcttggaggaatgaatgcaaccagtgtaaggcccctaaaccagatggcccaggagggggaccaggtggctctcacatggggggtaactacggggatgatcgtcgtggtggcagaggtggtgcgatcgcaggcgccgattacaaggacgatgatgacaagggagcaccaggaagtgctggttctgctgctggtagtggagcatcgatagagcagaagctgatctcagaggaggacctgctagccaccatggacgcacaaacacgacgacgtgagcgtcgcgctgagaaacaagctcaatggaaagctgcaaacccaccgctcgacggagccggagctggcgctggagctggagccggagctggcggtctagccaccatggacgcacaaacacgacgacgtgagcgtcgcgctgagaaacaagctcaatggaaagctgcaaacccaccgctcgacggagccggagctggcgctggagctggagccggagctggcggtctagccaccatggacgcacaaacacgacgacgtgagcgtcgcgctgagaaacaagctcaatggaaagctgcaaacccaccgctcgacggagccggagctggcgctggagctggagccggagctggcggtctagccaccatggacgcacaaacacgacgacgtgagcgtcgcgctgagaaacaagctcaatggaaagctgcaaacccaccgctcgagtctagagggcccgttggtgctcctggttcagcaggaagcgcagcaggatcaggtgcgtgcccggtgccgctgcagctgccgccgctggaacgcctgaccctggatgacaaaaaaccgctgaataccctgatctctgctactggtctgtggatgagtcgtaccggaaccattcataaaatcaaacaccacgaggttagccgttcgaaaatctatattgagatggcgtgtggcgatcatctggttgtgaacaatagccgctcttctcgtacagcacgtgcactgcgtcaccacaaatatcgtaaaacctgtaaacgttgccgtgtgtccgatgaggatctgaacaaattcctgacaaaagccaatgaggaccaaacaagcgtgaaagtgaaagtcgttagcgctcctacccgtactaaaaaagcaatgccgaaatccgttgctcgtgcccctaaaccactggaaaacactgaagcagcacaggcacagccgtctggaagcaaattctctccggccattcctgtttctacccaggagtccgtttctgttccagcaagtgtgagcaccagcattagcagtattagcaccggtgccaccgctagcgccctggttaaaggcaataccaatccgattacaagcatgtctgccccggttcaagcatcagctccagcactgacaaaatcccaaaccgatcgtctggaggttctgctgaatccgaaagacgaaatcagcctgaattccggcaaaccgtttcgtgaactggagagcgaactgctgtcacgtcgtaaaaaagacctgcaacaaatctatgccgaagaacgtgagaactatctggggaaactggaacgtgaaatcacccgctttttcgtggatcgtggctttctggagatcaaatccccgattctgattcctctggagtatatcgagcgtatgggcatcgacaatgataccgaactgagcaaacaaattttccgtgtggataaaaacttctgtctgcgccctatgcttgcaccaaatatgctgaactatagccgcaaactggaccgtgccctgcctgatcctatcaaaatcttcgagatcggcccgtgttatcgtaaagagtccgacggtaaagaacatctggaggagtttaccatgctgtcttttatgcaaatgggttcaggttgtactcgtgagaacctggaaagcatcatcaccgattttctgaaccacctgggcattgacttcaaaattgtgggcgacagctgtatggtgtatggcgacaccctggatgtcatgcacggcgacctggaactgtctagtgccgttgttggaccaattccgctggaccgtgagtggggtatcgacaaaccgtggatcggagcaggattcggtctggaacgcctgctgaaagtgaaacacgacttcaaaaacatcaaacgtgccgcccgttctgaatcgtattataacgggatctctacgaacctgtaa

SEQ ID NO: 442 - protein, 1205 aa, Artificial Sequence
  Description of Artificial Sequence: Synthetic polypeptide
  EBAG91-29::FUS::4xlambdaN22::IFRS1
MAITQFRLFKFCTCLATVFSFLKRLICRSGAPGSAGSAAGSGMASNDYTQQATQSYGAYPTQPGQGYSQQSSQPYGQQSYSGYSQSTDTSGYGQSSYSSYGQSQNTGYGTQSTPQGYGSTGGYGSSQSSQSSYGQQSSYPGYGQQPAPSSTSGSYGSSSQSSSYGQPQSGSYSQQPSYGGQQQSYGQQQSYNPPQGYGQQNQYNSSSGGGGGGGGGGNYGQDQSSMSSGGGSGGGYGNQDQSGGGGSGGYGQQDRGGRGRGGSGGGGGGGGGGYNRSSGGYEPRGRGGGRGGRGGMGGSDRGGFNKFGGPRDQGSRHDSEQDNSDNNTIFVQGLGENVTIESVADYFKQIGIIKTNKKTGQPMINLYTDRETGKLKGEATVSFDDPPSAKAAIDWFDGKEFSGNPIKVSFATRRADFNRGGGNGRGGRGRGGPMGRGGYGGGGSGGGGRGGFPSGGGGGGGQQRAGDWKCPNPTCENMNFSWRNECNQCKAPKPDGPGGGPGGSHMGGNYGDDRRGGRGGAIAGADYKDDDDKGAPGSAGSAAGSGASIEQKLISEEDLLATMDAQTRRRERRAEKQAQWKAANPPLDGAGAGAGAGAGAGGLATMDAQTRRRERRAEKQAQWKAANPPLDGAGAGAGAGAGAGGLATMDAQTRRRERRAEKQAQWKAANPPLDGAGAGAGAGAGAGGLATMDAQTRRRERRAEKQAQWKAANPPLESRGPVGAPGSAGSAAGSGACPVPLQLPPLERLTLDDKKPLNTLISATGLWMSRTGTIHKIKHHEVSRSKIYIEMACGDHLVVNNSRSSRTARALRHHKYRKTCKRCRVSDEDLNKFLTKANEDQTSVKVKVVSAPTRTKKAMPKSVARAPKPLENTEAAQAQPSGSKFSPAIPVSTQESVSVPASVSTSISSISTGATASALVKGNTNPITSMSAPVQASAPALTKSQTDRLEVLLNPKDEISLNSGKPFRELESELLSRRKKDLQQIYAEERENYLGKLEREITRFFVDRGFLEIKSPILIPLEYIERMGIDNDTELSKQIFRVDKNFCLRPMLAPNMLNYSRKLDRALPDPIKIFEIGPCYRKESDGKEHLEEFTMLSFMQMGSGCTRENLESIITDFLNHLGIDFKIVGDSCMVYGDTLDVMHGDLELSSAVVGPIPLDREWGIDKPWIGAGFGLERLLKVKHDFKNIKRAARSESYYNGISTNL

SEQ ID NO: 443 - DNA, 3906 bp, Artificial Sequence
  Description of Artificial Sequence: Synthetic polynucleotide
  KIF16B::EWSR1::Myc::2xPCP
atggcatcggtcaaggtggccgtgagggtccggcccatgaatcgcagggaaaaggacttggaggccaagttcattattcagatggagaaaagcaaaacgacaatcacaaacttaaagataccagaaggaggcactggggactcaggaagagaacggaccaagaccttcacctatgacttttctttttattctgctgatacaaaaagcccagattacgtttcacaagaaatggttttcaaaaccctcggcacagatgtcgtgaagtctgcatttgaaggttataatgcttgtgtctttgcatatgggcaaactggatctggaaagtcatacactatgatgggaaattctggagattctggcttaatacctcggatctgtgaaggactcttcagtcggataaatgaaaccaccagatgggatgaagcttcttttcgaactgaagtcagctacttagaaatttataacgaacgtgtgagagatctacttcggcggaagtcatctaaaaccttcaatttgagagtccgtgagcatcccaaagaaggcccttatgttgaggatttatccaaacatttagtacagaattatggtgacgtagaagaacttatggatgcgggcaatatcaaccggaccaccgcagcgactgggatgaacgacgtcagtagcaggtctcatgccatcttcaccatcaagttcactcaggctaaatttgattctgaaatgccatgtgaaaccgtcagtaagatccacttggttgatcttgccggaagtgagcgtgcagatgccaccggagccaccggggttaggctaaaggaagggggaaatattaacaagtccctcgtgactctggggaacgtcatttctgccttagctgatttatctcaggatgctgcaaatactcttgcaaagaagaagcaagttttcgtgccttacagggattctgtgttgacttggttgttaaaagatagccttggaggaaactctaaaactatcatgattgccaccatttcacctgctgatgtcaattatggagaaaccctaagtactcttcgctatgcaaatagagccaaaaacatcatcaacaagcctaccattaatgaggatgccaacgtcaaacttatccgtgagctgcgagctgaaatagccagactgaaaacgctgcttgctcaagggaatcagattgccctcttagactcccccacaatggcgtccacggattacagtacctatagccaagctgcagcgcagcagggctacagtgcttacaccgcccagcccactcaaggatatgcacagaccacccaggcatatgggcaacaaagctatggaacctatggacagcccactgatgtcagctatacccaggctcagaccactgcaacctatgggcagaccgcctatgcaacttcttatggacagcctcccactggttatactactccaactgccccccaggcatacagccagcctgtccaggggtatggcactggtgcttatgataccaccactgctacagtcaccaccacccaggcctcctatgcagctcagtctgcatatggcactcagcctgcttatccagcctatgggcagcagccagcagccactgcacctacaagaccgcaggatggaaacaagcccactgagactagtcaacctcaatctagcacagggggttacaaccagcccagcctaggatatggacagagtaactacagttatccccaggtacctgggagctaccccatgcagccagtcactgcacctccatcctaccctcctaccagctattcctctacacagccgactagttatgatcagagcagttactctcagcagaacacctatgggcaaccgagcagctatggacagcagagtagctatggtcaacaaagcagctatgggcagcagcctcccactagttacccaccccaaactggatcctacagccaagctccaagtcaatatagccaacagagcagcagctacgggcagcagagttcattccgacaggaccaccccagtagcatgggtgtttatgggcaggagtctggaggattttccggaccaggagagaaccggagcatgagtggccctgataaccggggcaggggaagagggggatttgatcgtggaggcatgagcagaggtgggcggggaggaggacgcggtggaatgggcagcgctggagagcgaggtggcttcaataagcctggtggacccatggatgaaggaccagatcttgatctaggcccacctgtagatccagatgaagactctgacaacagtgcaatttatgtacaaggattaaatgacagtgtgactctagatgatctggcagacttctttaagcagtgtggggttgttaagatgaacaagagaactgggcaacccatgatccacatctacctggacaaggaaacaggaaagcccaaaggcgatgccacagtgtcctatgaagacccacctactgccaaggctgccgtggaatggtttgatgggaaagattttcaagggagcaaacttaaagtctcccttgctcggaagaagcctccaatgaacagtatgcggggtggtctgccaccccgtgagggcagaggcatgccaccaccactccgtggaggtccaggaggcccaggaggtcctgggggacccatgggtcgcatgggaggccgtggaggagatagaggaggcttccctccaagaggaccccggggttcccgagggaacccctctggaggaggaaacgtccagcaccgagctggagactggcagtgtcccaatccgggttgtggaaaccagaacttcgcctggagaacagagtgcaaccagtgtaaggccccaaagcctgaaggcttcctcccgccaccctttccgcccccgggtggtgatcgtggcagaggtggccctggtggcatgcggggaggaagaggtggcctcatggatcgtggtggtcccggtggaatgttcagaggtggccgtggtggagacagaggtggcttccgtggtggccggggcatggaccgaggtggctttggtggaggaagacgaggtggccctggggggccccctggacctttgatggaacaggcgatcgcagagcagaagctgatctcagaggaggacctgatcgaaggccgccatatgctagcctccaaaaccatcgttctttcggtcggcgaggctactcgcactctgactgagatccagtccaccgcagaccgtcagatcttcgaagagaaggtcgggcctctggtgggtcggctgcgcctcacggcttcgctccgtcaaaacggagccaagaccgcgtatcgcgtcaacctaaaactggatcaggcggacgtcgttgattccggacttccgaaagtgcgctacactcaggtatggtcgcacgacgtgacaatcgttgcgaatagcaccgaggcctcgcgcaaatcgttgtacgatttgaccaagtccctcgtcgcgacctcgcaggtcgaagatcttgtcgtcaaccttgtgccgctgggccgtgcggatccgctagcctccaaaaccatcgttctttcggtcggcgaggctactcgcactctgactgagatccagtccaccgcagaccgtcagatcttcgaagagaaggtcgggcctctggtgggtcggctgcgcctcacggcttcgctccgtcaaaacggagccaagaccgcgtatcgcgtcaacctaaaactggatcaggcggacgtcgttgattccggacttccgaaagtgcgctacactcaggtatggtcgcacgacgtgacaatcgttgcgaatagcaccgaggcctcgcgcaaatcgttgtacgatttgaccaagtccctcgtcgcgacctcgcaggtcgaagatcttgtcgtcaaccttgtgccgctgggccgtccaccggtcgccacctaa

SEQ ID NO: 444 - protein, 1301 aa, Artificial Sequence
  Description of Artificial Sequence: Synthetic polypeptide
  KIF16B::EWSR1::Myc::2xPCP
MASVKVAVRVRPMNRREKDLEAKFIIQMEKSKTTITNLKIPEGGTGDSGRERTKTFTYDFSFYSADTKSPDYVSQEMVFKTLGTDVVKSAFEGYNACVFAYGQTGSGKSYTMMGNSGDSGLIPRICEGLFSRINETTRWDEASFRTEVSYLEIYNERVRDLLRRKSSKTFNLRVREHPKEGPYVEDLSKHLVQNYGDVEELMDAGNINRTTAATGMNDVSSRSHAIFTIKFTQAKFDSEMPCETVSKIHLVDLAGSERADATGATGVRLKEGGNINKSLVTLGNVISALADLSQDAANTLAKKKQVFVPYRDSVLTWLLKDSLGGNSKTIMIATISPADVNYGETLSTLRYANRAKNIINKPTINEDANVKLIRELRAEIARLKTLLAQGNQIALLDSPTMASTDYSTYSQAAAQQGYSAYTAQPTQGYAQTTQAYGQQSYGTYGQPTDVSYTQAQTTATYGQTAYATSYGQPPTGYTTPTAPQAYSQPVQGYGTGAYDTTTATVTTTQASYAAQSAYGTQPAYPAYGQQPAATAPTRPQDGNKPTETSQPQSSTGGYNQPSLGYGQSNYSYPQVPGSYPMQPVTAPPSYPPTSYSSTQPTSYDQSSYSQQNTYGQPSSYGQQSSYGQQSSYGQQPPTSYPPQTGSYSQAPSQYSQQSSSYGQQSSFRQDHPSSMGVYGQESGGFSGPGENRSMSGPDNRGRGRGGFDRGGMSRGGRGGGRGGMGSAGERGGFNKPGGPMDEGPDLDLGPPVDPDEDSDNSAIYVQGLNDSVTLDDLADFFKQCGVVKMNKRTGQPMIHIYLDKETGKPKGDATVSYEDPPTAKAAVEWFDGKDFQGSKLKVSLARKKPPMNSMRGGLPPREGRGMPPPLRGGPGGPGGPGGPMGRMGGRGGDRGGFPPRGPRGSRGNPSGGGNVQHRAGDWQCPNPGCGNQNFAWRTECNQCKAPKPEGFLPPPFPPPGGDRGRGGPGGMRGGRGGLMDRGGPGGMFRGGRGGDRGGFRGGRGMDRGGFGGGRRGGPGGPPGPLMEQAIAEQKLISEEDLIEGRHMLASKTIVLSVGEATRTLTEIQSTADRQIFEEKVGPLVGRLRLTASLRQNGAKTAYRVNLKLDQADVVDSGLPKVRYTQVWSHDVTIVANSTEASRKSLYDLTKSLVATSQVEDLVVNLVPLGRADPLASKTIVLSVGEATRTLTEIQSTADRQIFEEKVGPLVGRLRLTASLRQNGAKTAYRVNLKLDQADVVDSGLPKVRYTQVWSHDVTIVANSTEASRKSLYDLTKSLVATSQVEDLVVNLVPLGRPPVAT

SEQ ID NO: 445 - DNA, 3903 bp, Artificial Sequence
  Description of Artificial Sequence: Synthetic polynucleotide
  KIF16B::EWSR1::HA::2xPCP
atggcatcggtcaaggtggccgtgagggtccggcccatgaatcgcagggaaaaggacttggaggccaagttcattattcagatggagaaaagcaaaacgacaatcacaaacttaaagataccagaaggaggcactggggactcaggaagagaacggaccaagaccttcacctatgacttttctttttattctgctgatacaaaaagcccagattacgtttcacaagaaatggttttcaaaaccctcggcacagatgtcgtgaagtctgcatttgaaggttataatgcttgtgtctttgcatatgggcaaactggatctggaaagtcatacactatgatgggaaattctggagattctggcttaatacctcggatctgtgaaggactcttcagtcggataaatgaaaccaccagatgggatgaagcttcttttcgaactgaagtcagctacttagaaatttataacgaacgtgtgagagatctacttcggcggaagtcatctaaaaccttcaatttgagagtccgtgagcatcccaaagaaggcccttatgttgaggatttatccaaacatttagtacagaattatggtgacgtagaagaacttatggatgcgggcaatatcaaccggaccaccgcagcgactgggatgaacgacgtcagtagcaggtctcatgccatcttcaccatcaagttcactcaggctaaatttgattctgaaatgccatgtgaaaccgtcagtaagatccacttggttgatcttgccggaagtgagcgtgcagatgccaccggagccaccggggttaggctaaaggaagggggaaatattaacaagtccctcgtgactctggggaacgtcatttctgccttagctgatttatctcaggatgctgcaaatactcttgcaaagaagaagcaagttttcgtgccttacagggattctgtgttgacttggttgttaaaagatagccttggaggaaactctaaaactatcatgattgccaccatttcacctgctgatgtcaattatggagaaaccctaagtactcttcgctatgcaaatagagccaaaaacatcatcaacaagcctaccattaatgaggatgccaacgtcaaacttatccgtgagctgcgagctgaaatagccagactgaaaacgctgcttgctcaagggaatcagattgccctcttagactcccccacaatggcgtccacggattacagtacctatagccaagctgcagcgcagcagggctacagtgcttacaccgcccagcccactcaaggatatgcacagaccacccaggcatatgggcaacaaagctatggaacctatggacagcccactgatgtcagctatacccaggctcagaccactgcaacctatgggcagaccgcctatgcaacttcttatggacagcctcccactggttatactactccaactgccccccaggcatacagccagcctgtccaggggtatggcactggtgcttatgataccaccactgctacagtcaccaccacccaggcctcctatgcagctcagtctgcatatggcactcagcctgcttatccagcctatgggcagcagccagcagccactgcacctacaagaccgcaggatggaaacaagcccactgagactagtcaacctcaatctagcacagggggttacaaccagcccagcctaggatatggacagagtaactacagttatccccaggtacctgggagctaccccatgcagccagtcactgcacctccatcctaccctcctaccagctattcctctacacagccgactagttatgatcagagcagttactctcagcagaacacctatgggcaaccgagcagctatggacagcagagtagctatggtcaacaaagcagctatgggcagcagcctcccactagttacccaccccaaactggatcctacagccaagctccaagtcaatatagccaacagagcagcagctacgggcagcagagttcattccgacaggaccaccccagtagcatgggtgtttatgggcaggagtctggaggattttccggaccaggagagaaccggagcatgagtggccctgataaccggggcaggggaagagggggatttgatcgtggaggcatgagcagaggtgggcggggaggaggacgcggtggaatgggcagcgctggagagcgaggtggcttcaataagcctggtggacccatggatgaaggaccagatcttgatctaggcccacctgtagatccagatgaagactctgacaacagtgcaatttatgtacaaggattaaatgacagtgtgactctagatgatctggcagacttctttaagcagtgtggggttgttaagatgaacaagagaactgggcaacccatgatccacatctacctggacaaggaaacaggaaagcccaaaggcgatgccacagtgtcctatgaagacccacctactgccaaggctgccgtggaatggtttgatgggaaagattttcaagggagcaaacttaaagtctcccttgctcggaagaagcctccaatgaacagtatgcggggtggtctgccaccccgtgagggcagaggcatgccaccaccactccgtggaggtccaggaggcccaggaggtcctgggggacccatgggtcgcatgggaggccgtggaggagatagaggaggcttccctccaagaggaccccggggttcccgagggaacccctctggaggaggaaacgtccagcaccgagctggagactggcagtgtcccaatccgggttgtggaaaccagaacttcgcctggagaacagagtgcaaccagtgtaaggccccaaagcctgaaggcttcctcccgccaccctttccgcccccgggtggtgatcgtggcagaggtggccctggtggcatgcggggaggaagaggtggcctcatggatcgtggtggtcccggtggaatgttcagaggtggccgtggtggagacagaggtggcttccgtggtggccggggcatggaccgaggtggctttggtggaggaagacgaggtggccctggggggccccctggacctttgatggaacaggcgatcgcatacccctacgacgtgcccgactacgccatcgaaggccgccatatgctagcctccaaaaccatcgttctttcggtcggcgaggctactcgcactctgactgagatccagtccaccgcagaccgtcagatcttcgaagagaaggtcgggcctctggtgggtcggctgcgcctcacggcttcgctccgtcaaaacggagccaagaccgcgtatcgcgtcaacctaaaactggatcaggcggacgtcgttgattccggacttccgaaagtgcgctacactcaggtatggtcgcacgacgtgacaatcgttgcgaatagcaccgaggcctcgcgcaaatcgttgtacgatttgaccaagtccctcgtcgcgacctcgcaggtcgaagatcttgtcgtcaaccttgtgccgctgggccgtgcggatccgctagcctccaaaaccatcgttctttcggtcggcgaggctactcgcactctgactgagatccagtccaccgcagaccgtcagatcttcgaagagaaggtcgggcctctggtgggtcggctgcgcctcacggcttcgctccgtcaaaacggagccaagaccgcgtatcgcgtcaacctaaaactggatcaggcggacgtcgttgattccggacttccgaaagtgcgctacactcaggtatggtcgcacgacgtgacaatcgttgcgaatagcaccgaggcctcgcgcaaatcgttgtacgatttgaccaagtccctcgtcgcgacctcgcaggtcgaagatcttgtcgtcaaccttgtgccgctgggccgtccaccggtcgccacctaa

SEQ ID NO: 446 - protein, 1300 aa, Artificial Sequence
  Description of Artificial Sequence: Synthetic polypeptide
  KIF16B::EWSR1::HA::2xPCP
MASVKVAVRVRPMNRREKDLEAKFIIQMEKSKTTITNLKIPEGGTGDSGRERTKTFTYDFSFYSADTKSPDYVSQEMVFKTLGTDVVKSAFEGYNACVFAYGQTGSGKSYTMMGNSGDSGLIPRICEGLFSRINETTRWDEASFRTEVSYLEIYNERVRDLLRRKSSKTFNLRVREHPKEGPYVEDLSKHLVQNYGDVEELMDAGNINRTTAATGMNDVSSRSHAIFTIKFTQAKFDSEMPCETVSKIHLVDLAGSERADATGATGVRLKEGGNINKSLVTLGNVISALADLSQDAANTLAKKKQVFVPYRDSVLTWLLKDSLGGNSKTIMIATISPADVNYGETLSTLRYANRAKNIINKPTINEDANVKLIRELRAEIARLKTLLAQGNQIALLDSPTMASTDYSTYSQAAAQQGYSAYTAQPTQGYAQTTQAYGQQSYGTYGQPTDVSYTQAQTTATYGQTAYATSYGQPPTGYTTPTAPQAYSQPVQGYGTGAYDTTTATVTTTQASYAAQSAYGTQPAYPAYGQQPAATAPTRPQDGNKPTETSQPQSSTGGYNQPSLGYGQSNYSYPQVPGSYPMQPVTAPPSYPPTSYSSTQPTSYDQSSYSQQNTYGQPSSYGQQSSYGQQSSYGQQPPTSYPPQTGSYSQAPSQYSQQSSSYGQQSSFRQDHPSSMGVYGQESGGFSGPGENRSMSGPDNRGRGRGGFDRGGMSRGGRGGGRGGMGSAGERGGFNKPGGPMDEGPDLDLGPPVDPDEDSDNSAIYVQGLNDSVTLDDLADFFKQCGVVKMNKRTGQPMIHIYLDKETGKPKGDATVSYEDPPTAKAAVEWFDGKDFQGSKLKVSLARKKPPMNSMRGGLPPREGRGMPPPLRGGPGGPGGPGGPMGRMGGRGGDRGGFPPRGPRGSRGNPSGGGNVQHRAGDWQCPNPGCGNQNFAWRTECNQCKAPKPEGFLPPPFPPPGGDRGRGGPGGMRGGRGGLMDRGGPGGMFRGGRGGDRGGFRGGRGMDRGGFGGGRRGGPGGPPGPLMEQAIAYPYDVPDYAIEGRHMLASKTIVLSVGEATRTLTEIQSTADRQIFEEKVGPLVGRLRLTASLRQNGAKTAYRVNLKLDQADVVDSGLPKVRYTQVWSHDVTIVANSTEASRKSLYDLTKSLVATSQVEDLVVNLVPLGRADPLASKTIVLSVGEATRTLTEIQSTADRQIFEEKVGPLVGRLRLTASLRQNGAKTAYRVNLKLDQADVVDSGLPKVRYTQVWSHDVTIVANSTEASRKSLYDLTKSLVATSQVEDLVVNLVPLGRPPVAT

SEQ ID NO: 447 - DNA, 2793 bp, Artificial Sequence
  Description of Artificial Sequence: Synthetic polynucleotide
  EBAG91-29::EWSR1::Myc::2xPCP
atggccatcacccagtttcggttatttaaattttgtacctgcctagcaacagtattctcattcctaaagagattaatatgcagatctatggcgtccacggattacagtacctatagccaagctgcagcgcagcagggctacagtgcttacaccgcccagcccactcaaggatatgcacagaccacccaggcatatgggcaacaaagctatggaacctatggacagcccactgatgtcagctatacccaggctcagaccactgcaacctatgggcagaccgcctatgcaacttcttatggacagcctcccactggttatactactccaactgccccccaggcatacagccagcctgtccaggggtatggcactggtgcttatgataccaccactgctacagtcaccaccacccaggcctcctatgcagctcagtctgcatatggcactcagcctgcttatccagcctatgggcagcagccagcagccactgcacctacaagaccgcaggatggaaacaagcccactgagactagtcaacctcaatctagcacagggggttacaaccagcccagcctaggatatggacagagtaactacagttatccccaggtacctgggagctaccccatgcagccagtcactgcacctccatcctaccctcctaccagctattcctctacacagccgactagttatgatcagagcagttactctcagcagaacacctatgggcaaccgagcagctatggacagcagagtagctatggtcaacaaagcagctatgggcagcagcctcccactagttacccaccccaaactggatcctacagccaagctccaagtcaatatagccaacagagcagcagctacgggcagcagagttcattccgacaggaccaccccagtagcatgggtgtttatgggcaggagtctggaggattttccggaccaggagagaaccggagcatgagtggccctgataaccggggcaggggaagagggggatttgatcgtggaggcatgagcagaggtgggcggggaggaggacgcggtggaatgggcagcgctggagagcgaggtggcttcaataagcctggtggacccatggatgaaggaccagatcttgatctaggcccacctgtagatccagatgaagactctgacaacagtgcaatttatgtacaaggattaaatgacagtgtgactctagatgatctggcagacttctttaagcagtgtggggttgttaagatgaacaagagaactgggcaacccatgatccacatctacctggacaaggaaacaggaaagcccaaaggcgatgccacagtgtcctatgaagacccacctactgccaaggctgccgtggaatggtttgatgggaaagattttcaagggagcaaacttaaagtctcccttgctcggaagaagcctccaatgaacagtatgcggggtggtctgccaccccgtgagggcagaggcatgccaccaccactccgtggaggtccaggaggcccaggaggtcctgggggacccatgggtcgcatgggaggccgtggaggagatagaggaggcttccctccaagaggaccccggggttcccgagggaacccctctggaggaggaaacgtccagcaccgagctggagactggcagtgtcccaatccgggttgtggaaaccagaacttcgcctggagaacagagtgcaaccagtgtaaggccccaaagcctgaaggcttcctcccgccaccctttccgcccccgggtggtgatcgtggcagaggtggccctggtggcatgcggggaggaagaggtggcctcatggatcgtggtggtcccggtggaatgttcagaggtggccgtggtggagacagaggtggcttccgtggtggccggggcatggaccgaggtggctttggtggaggaagacgaggtggccctggggggccccctggacctttgatggaacaggcgatcgcagagcagaagctgatctcagaggaggacctgatcgaaggccgccatatgctagcctccaaaaccatcgttctttcggtcggcgaggctactcgcactctgactgagatccagtccaccgcagaccgtcagatcttcgaagagaaggtcgggcctctggtgggtcggctgcgcctcacggcttcgctccgtcaaaacggagccaagaccgcgtatcgcgtcaacctaaaactggatcaggcggacgtcgttgattccggacttccgaaagtgcgctacactcaggtatggtcgcacgacgtgacaatcgttgcgaatagcaccgaggcctcgcgcaaatcgttgtacgatttgaccaagtccctcgtcgcgacctcgcaggtcgaagatcttgtcgtcaaccttgtgccgctgggccgtgcggatccgctagcctccaaaaccatcgttctttcggtcggcgaggctactcgcactctgactgagatccagtccaccgcagaccgtcagatcttcgaagagaaggtcgggcctctggtgggtcggctgcgcctcacggcttcgctccgtcaaaacggagccaagaccgcgtatcgcgtcaacctaaaactggatcaggcggacgtcgttgattccggacttccgaaagtgcgctacactcaggtatggtcgcacgacgtgacaatcgttgcgaatagcaccgaggcctcgcgcaaatcgttgtacgatttgaccaagtccctcgtcgcgacctcgcaggtcgaagatcttgtcgtcaaccttgtgccgctgggccgtccaccggtcgccacctaa

SEQ ID NO: 448 - protein, 930 aa, Artificial Sequence
  Description of Artificial Sequence: Synthetic polypeptide
  EBAG91-29::EWSR1::Myc::2xPCP
MAITQFRLFKFCTCLATVFSFLKRLICRSMASTDYSTYSQAAAQQGYSAYTAQPTQGYAQTTQAYGQQSYGTYGQPTDVSYTQAQTTATYGQTAYATSYGQPPTGYTTPTAPQAYSQPVQGYGTGAYDTTTATVTTTQASYAAQSAYGTQPAYPAYGQQPAATAPTRPQDGNKPTETSQPQSSTGGYNQPSLGYGQSNYSYPQVPGSYPMQPVTAPPSYPPTSYSSTQPTSYDQSSYSQQNTYGQPSSYGQQSSYGQQSSYGQQPPTSYPPQTGSYSQAPSQYSQQSSSYGQQSSFRQDHPSSMGVYGQESGGFSGPGENRSMSGPDNRGRGRGGFDRGGMSRGGRGGGRGGMGSAGERGGFNKPGGPMDEGPDLDLGPPVDPDEDSDNSAIYVQGLNDSVTLDDLADFFKQCGVVKMNKRTGQPMIHIYLDKETGKPKGDATVSYEDPPTAKAAVEWFDGKDFQGSKLKVSLARKKPPMNSMRGGLPPREGRGMPPPLRGGPGGPGGPGGPMGRMGGRGGDRGGFPPRGPRGSRGNPSGGGNVQHRAGDWQCPNPGCGNQNFAWRTECNQCKAPKPEGFLPPPFPPPGGDRGRGGPGGMRGGRGGLMDRGGPGGMFRGGRGGDRGGFRGGRGMDRGGFGGGRRGGPGGPPGPLMEQAIAEQKLISEEDLIEGRHMLASKTIVLSVGEATRTLTEIQSTADRQIFEEKVGPLVGRLRLTASLRQNGAKTAYRVNLKLDQADVVDSGLPKVRYTQVWSHDVTIVANSTEASRKSLYDLTKSLVATSQVEDLVVNLVPLGRADPLASKTIVLSVGEATRTLTEIQSTADRQIFEEKVGPLVGRLRLTASLRQNGAKTAYRVNLKLDQADVVDSGLPKVRYTQVWSHDVTIVANSTEASRKSLYDLTKSLVATSQVEDLVVNLVPLGRPPVAT

SEQ ID NO: 449 - DNA, 2790 bp, Artificial Sequence
  Description of Artificial Sequence: Synthetic polynucleotide
  EBAG91-29::EWSR1::HA::2xPCP
atggccatcacccagtttcggttatttaaattttgtacctgcctagcaacagtattctcattcctaaagagattaatatgcagatctatggcgtccacggattacagtacctatagccaagctgcagcgcagcagggctacagtgcttacaccgcccagcccactcaaggatatgcacagaccacccaggcatatgggcaacaaagctatggaacctatggacagcccactgatgtcagctatacccaggctcagaccactgcaacctatgggcagaccgcctatgcaacttcttatggacagcctcccactggttatactactccaactgccccccaggcatacagccagcctgtccaggggtatggcactggtgcttatgataccaccactgctacagtcaccaccacccaggcctcctatgcagctcagtctgcatatggcactcagcctgcttatccagcctatgggcagcagccagcagccactgcacctacaagaccgcaggatggaaacaagcccactgagactagtcaacctcaatctagcacagggggttacaaccagcccagcctaggatatggacagagtaactacagttatccccaggtacctgggagctaccccatgcagccagtcactgcacctccatcctaccctcctaccagctattcctctacacagccgactagttatgatcagagcagttactctcagcagaacacctatgggcaaccgagcagctatggacagcagagtagctatggtcaacaaagcagctatgggcagcagcctcccactagttacccaccccaaactggatcctacagccaagctccaagtcaatatagccaacagagcagcagctacgggcagcagagttcattccgacaggaccaccccagtagcatgggtgtttatgggcaggagtctggaggattttccggaccaggagagaaccggagcatgagtggccctgataaccggggcaggggaagagggggatttgatcgtggaggcatgagcagaggtgggcggggaggaggacgcggtggaatgggcagcgctggagagcgaggtggcttcaataagcctggtggacccatggatgaaggaccagatcttgatctaggcccacctgtagatccagatgaagactctgacaacagtgcaatttatgtacaaggattaaatgacagtgtgactctagatgatctggcagacttctttaagcagtgtggggttgttaagatgaacaagagaactgggcaacccatgatccacatctacctggacaaggaaacaggaaagcccaaaggcgatgccacagtgtcctatgaagacccacctactgccaaggctgccgtggaatggtttgatgggaaagattttcaagggagcaaacttaaagtctcccttgctcggaagaagcctccaatgaacagtatgcggggtggtctgccaccccgtgagggcagaggcatgccaccaccactccgtggaggtccaggaggcccaggaggtcctgggggacccatgggtcgcatgggaggccgtggaggagatagaggaggcttccctccaagaggaccccggggttcccgagggaacccctctggaggaggaaacgtccagcaccgagctggagactggcagtgtcccaatccgggttgtggaaaccagaacttcgcctggagaacagagtgcaaccagtgtaaggccccaaagcctgaaggcttcctcccgccaccctttccgcccccgggtggtgatcgtggcagaggtggccctggtggcatgcggggaggaagaggtggcctcatggatcgtggtggtcccggtggaatgttcagaggtggccgtggtggagacagaggtggcttccgtggtggccggggcatggaccgaggtggctttggtggaggaagacgaggtggccctggggggccccctggacctttgatggaacaggcgatcgcatacccctacgacgtgcccgactacgccatcgaaggccgccatatgctagcctccaaaaccatcgttctttcggtcggcgaggctactcgcactctgactgagatccagtccaccgcagaccgtcagatcttcgaagagaaggtcgggcctctggtgggtcggctgcgcctcacggcttcgctccgtcaaaacggagccaagaccgcgtatcgcgtcaacctaaaactggatcaggcggacgtcgttgattccggacttccgaaagtgcgctacactcaggtatggtcgcacgacgtgacaatcgttgcgaatagcaccgaggcctcgcgcaaatcgttgtacgatttgaccaagtccctcgtcgcgacctcgcaggtcgaagatcttgtcgtcaaccttgtgccgctgggccgtgcggatccgctagcctccaaaaccatcgttctttcggtcggcgaggctactcgcactctgactgagatccagtccaccgcagaccgtcagatcttcgaagagaaggtcgggcctctggtgggtcggctgcgcctcacggcttcgctccgtcaaaacggagccaagaccgcgtatcgcgtcaacctaaaactggatcaggcggacgtcgttgattccggacttccgaaagtgcgctacactcaggtatggtcgcacgacgtgacaatcgttgcgaatagcaccgaggcctcgcgcaaatcgttgtacgatttgaccaagtccctcgtcgcgacctcgcaggtcgaagatcttgtcgtcaaccttgtgccgctgggccgtccaccggtcgccacctaa

SEQ ID NO: 450 - protein, 929 aa, Artificial Sequence
  Description of Artificial Sequence: Synthetic polypeptide
  EBAG91-29::EWSR1::HA::2xPCP
MAITQFRLFKFCTCLATVFSFLKRLICRSMASTDYSTYSQAAAQQGYSAYTAQPTQGYAQTTQAYGQQSYGTYGQPTDVSYTQAQTTATYGQTAYATSYGQPPTGYTTPTAPQAYSQPVQGYGTGAYDTTTATVTTTQASYAAQSAYGTQPAYPAYGQQPAATAPTRPQDGNKPTETSQPQSSTGGYNQPSLGYGQSNYSYPQVPGSYPMQPVTAPPSYPPTSYSSTQPTSYDQSSYSQQNTYGQPSSYGQQSSYGQQSSYGQQPPTSYPPQTGSYSQAPSQYSQQSSSYGQQSSFRQDHPSSMGVYGQESGGFSGPGENRSMSGPDNRGRGRGGFDRGGMSRGGRGGGRGGMGSAGERGGFNKPGGPMDEGPDLDLGPPVDPDEDSDNSAIYVQGLNDSVTLDDLADFFKQCGVVKMNKRTGQPMIHIYLDKETGKPKGDATVSYEDPPTAKAAVEWFDGKDFQGSKLKVSLARKKPPMNSMRGGLPPREGRGMPPPLRGGPGGPGGPGGPMGRMGGRGGDRGGFPPRGPRGSRGNPSGGGNVQHRAGDWQCPNPGCGNQNFAWRTECNQCKAPKPEGFLPPPFPPPGGDRGRGGPGGMRGGRGGLMDRGGPGGMFRGGRGGDRGGFRGGRGMDRGGFGGGRRGGPGGPPGPLMEQAIAYPYDVPDYAIEGRHMLASKTIVLSVGEATRTLTEIQSTADRQIFEEKVGPLVGRLRLTASLRQNGAKTAYRVNLKLDQADVVDSGLPKVRYTQVWSHDVTIVANSTEASRKSLYDLTKSLVATSQVEDLVVNLVPLGRADPLASKTIVLSVGEATRTLTEIQSTADRQIFEEKVGPLVGRLRLTASLRQNGAKTAYRVNLKLDQADVVDSGLPKVRYTQVWSHDVTIVANSTEASRKSLYDLTKSLVATSQVEDLVVNLVPLGRPPVAT

SEQ ID NO: 451 - DNA, 1455 bp, Artificial Sequence
  Description of Artificial Sequence: Synthetic polynucleotide
  LCK::CbzRS
atgggctgcgtgtgcagcagcaaccccgagggtaccgagctcgcgtgcccggtgccgctgcagctgccgccgctggaacgcctgaccctggatgataaaaaaccgctgaataccctgatctctgctactggtctgtggatgagtcgtaccggaaccattcataaaatcaaacaccacgaggttagccgttcgaaaatctatattgagatggcgtgtggcgatcatctggttgtgaacaatagccgctcttctcgtacagcacgtgcactgcgtcaccacaaatatcgtaaaacctgtaaacgttgccgtgtgtccgatgaggatctgaacaaattcctgacaaaagccaatgaggaccaaacaagcgtgaaagtgaaagtcgttagcgctcctacccgtactaaaaaagcaatgccgaaatccgttgctcgtgcccctaaaccactggaaaacactgaagcagcacaggcacagccgtctggaagcaaattctctccggccattcctgtttctacccaggagtccgtttctgttccagcaagtgtgagcaccagcattagcagtattagcaccggtgccaccgctagcgccctggttaaaggcaataccaatccgattacaagcatgtctgccccggttcaagcatcagctccagcactgacaaaatcccaaaccgatcgtctggaggttctgctgaatccgaaagacgaaatcagcctgaattccggcaaaccgtttcgtgaactggagagcgaactgctgtcacgtcgtaaaaaagacctgcaacaaatctatgccgaagaacgtgagaactatctggggaaactggaacgtgaaatcacccgctttttcgtggatcgtggctttctggagatcaaatccccgattctgattcctctggagtatatcgagcgtatgggcatcgacaatgataccgaactgagcaaacaaattttccgtgtggataaaaacttctgtctgcgccctatgcttgcaccaaatctgatgaactatggacgcaaactggaccgtgccctgcctgatcctatcaaaatcttcgagatcggcccgtgttatcgtaaagagtccgacggtaaagaacatctggaggagtttaccatgctgaactttacacaaatgggttcaggttgtactcgtgagaacctggaaagcatcatcaccgattttctgaaccacctgggcattgacttcaaaattgtgggcgacagctgtatggtgtatggcgacaccctggatgtcatgcacggcgacctggaactgtctagtgccgttgttggaccaattccgctggaccgtgagtggggtatcgacaaaccgtggatcggagcaggattcggtctggaacgcctgctgaaagtgaaacacgacttcaaaaacatcaaacgtgccgcccgttctgaatcgtattataacgggatctctacgaacctgtaa

SEQ ID NO: 452 - protein, 484 aa, Artificial Sequence
  Description of Artificial Sequence: Synthetic polypeptide
  LCK::CbzRS
MGCVCSSNPEGTELACPVPLQLPPLERLTLDDKKPLNTLISATGLWMSRTGTIHKIKHHEVSRSKIYIEMACGDHLVVNNSRSSRTARALRHHKYRKTCKRCRVSDEDLNKFLTKANEDQTSVKVKVVSAPTRTKKAMPKSVARAPKPLENTEAAQAQPSGSKFSPAIPVSTQESVSVPASVSTSISSISTGATASALVKGNTNPITSMSAPVQASAPALTKSQTDRLEVLLNPKDEISLNSGKPFRELESELLSRRKKDLQQIYAEERENYLGKLEREITRFFVDRGFLEIKSPILIPLEYIERMGIDNDTELSKQIFRVDKNFCLRPMLAPNLMNYGRKLDRALPDPIKIFEIGPCYRKESDGKEHLEEFTMLNFTQMGSGCTRENLESIITDFLNHLGIDFKIVGDSCMVYGDTLDVMHGDLELSSAVVGPIPLDREWGIDKPWIGAGFGLERLLKVKHDFKNIKRAARSESYYNGISTNL

SEQ ID NO: 453 - DNA, 2928 bp, Artificial Sequence
  Description of Artificial Sequence: Synthetic polynucleotide
  LCK::FUS::CbzRS
atgggctgcgtgtgcagcagcaaccccgagggtaccgagctcgcctcaaacgattatacccaacaagcaacccaaagctatggggcctaccccacccagcccgggcagggctattcccagcagagcagtcagccctacggacagcagagttacagtggttatagccagtccacggacacttcaggatatggccagagcagctattcttcttatggccagagccagaacacaggctatggaactcagtcaactccccagggatatggctcgactggcggctatggcagtagccagagctcccaatcgtcttacgggcagcagtcctcctaccctggctatggccagcagccagctcccagcagcacctcgggaagttacggtagcagttctcagagcagcagctatgggcagccccagagtgggagctacagccagcagcctagctatggtggacagcagcaaagctatggacagcagcaaagctataatccccctcagggctatggacagcagaaccagtacaacagcagcagtggtggtggaggtggaggtggaggtggaggtaactatggccaagatcaatcctccatgagtagtggtggtggcagtggtggcggttatggcaatcaagaccagagtggtggaggtggcagcggtggctatggacagcaggaccgtggaggccgcggcaggggtggcagtggtggcggcggcggcggcggcggtggtggttacaaccgcagcagtggtggctatgaacccagaggtcgtggaggtggccgtggaggcagaggtggcatgggcggaagtgaccgtggtggcttcaataaatttggtggccctcgggaccaaggatcacgtcatgactccgaacaggataattcagacaacaacaccatctttgtgcaaggcctgggtgagaatgttacaattgagtctgtggctgattacttcaagcagattggtattattaagacaaacaagaaaacgggacagcccatgattaatttgtacacagacagggaaactggcaagctgaagggagaggcaacggtctcttttgatgacccaccttcagctaaagcagctattgactggtttgatggtaaagaattctccggaaatcctatcaaggtctcatttgctactcgccgggcagactttaatcggggtggtggcaatggtcgtggaggccgagggcgaggaggacccatgggccgtggaggctatggaggtggtggcagtggtggtggtggccgaggaggatttcccagtggaggtggtggcggtggaggacagcagcgagctggtgactggaagtgtcctaatcccacctgtgagaatatgaacttctcttggaggaatgaatgcaaccagtgtaaggcccctaaaccagatggcccaggagggggaccaggtggctctcacatggggggtaactacggggatgatcgtcgtggtggcagaggaggcggcgcccccggctccgccggctccgccgccggctccggcatggcgtgcccggtgccgctgcagctgccgccgctggaacgcctgaccctggatgataaaaaaccgctgaataccctgatctctgctactggtctgtggatgagtcgtaccggaaccattcataaaatcaaacaccacgaggttagccgttcgaaaatctatattgagatggcgtgtggcgatcatctggttgtgaacaatagccgctcttctcgtacagcacgtgcactgcgtcaccacaaatatcgtaaaacctgtaaacgttgccgtgtgtccgatgaggatctgaacaaattcctgacaaaagccaatgaggaccaaacaagcgtgaaagtgaaagtcgttagcgctcctacccgtactaaaaaagcaatgccgaaatccgttgctcgtgcccctaaaccactggaaaacactgaagcagcacaggcacagccgtctggaagcaaattctctccggccattcctgtttctacccaggagtccgtttctgttccagcaagtgtgagcaccagcattagcagtattagcaccggtgccaccgctagcgccctggttaaaggcaataccaatccgattacaagcatgtctgccccggttcaagcatcagctccagcactgacaaaatcccaaaccgatcgtctggaggttctgctgaatccgaaagacgaaatcagcctgaattccggcaaaccgtttcgtgaactggagagcgaactgctgtcacgtcgtaaaaaagacctgcaacaaatctatgccgaagaacgtgagaactatctggggaaactggaacgtgaaatcacccgctttttcgtggatcgtggctttctggagatcaaatccccgattctgattcctctggagtatatcgagcgtatgggcatcgacaatgataccgaactgagcaaacaaattttccgtgtggataaaaacttctgtctgcgccctatgcttgcaccaaatctgatgaactatggacgcaaactggaccgtgccctgcctgatcctatcaaaatcttcgagatcggcccgtgttatcgtaaagagtccgacggtaaagaacatctggaggagtttaccatgctgaactttacacaaatgggttcaggttgtactcgtgagaacctggaaagcatcatcaccgattttctgaaccacctgggcattgacttcaaaattgtgggcgacagctgtatggtgtatggcgacaccctggatgtcatgcacggcgacctggaactgtctagtgccgttgttggaccaattccgctggaccgtgagtggggtatcgacaaaccgtggatcggagcaggattcggtctggaacgcctgctgaaagtgaaacacgacttcaaaaacatcaaacgtgccgcccgttctgaatcgtattataacgggatctctacgaacctgtaa

SEQ ID NO: 454 - protein, 975 aa, Artificial Sequence
  Description of Artificial Sequence: Synthetic polypeptide
  LCK::FUS::CbzRS
MGCVCSSNPEGTELASNDYTQQATQSYGAYPTQPGQGYSQQSSQPYGQQSYSGYSQSTDTSGYGQSSYSSYGQSQNTGYGTQSTPQGYGSTGGYGSSQSSQSSYGQQSSYPGYGQQPAPSSTSGSYGSSSQSSSYGQPQSGSYSQQPSYGGQQQSYGQQQSYNPPQGYGQQNQYNSSSGGGGGGGGGGNYGQDQSSMSSGGGSGGGYGNQDQSGGGGSGGYGQQDRGGRGRGGSGGGGGGGGGGYNRSSGGYEPRGRGGGRGGRGGMGGSDRGGFNKFGGPRDQGSRHDSEQDNSDNNTIFVQGLGENVTIESVADYFKQIGIIKTNKKTGQPMINLYTDRETGKLKGEATVSFDDPPSAKAAIDWFDGKEFSGNPIKVSFATRRADFNRGGGNGRGGRGRGGPMGRGGYGGGGSGGGGRGGFPSGGGGGGGQQRAGDWKCPNPTCENMNFSWRNECNQCKAPKPDGPGGGPGGSHMGGNYGDDRRGGRGGGAPGSAGSAAGSGMACPVPLQLPPLERLTLDDKKPLNTLISATGLWMSRTGTIHKIKHHEVSRSKIYIEMACGDHLVVNNSRSSRTARALRHHKYRKTCKRCRVSDEDLNKFLTKANEDQTSVKVKVVSAPTRTKKAMPKSVARAPKPLENTEAAQAQPSGSKFSPAIPVSTQESVSVPASVSTSISSISTGATASALVKGNTNPITSMSAPVQASAPALTKSQTDRLEVLLNPKDEISLNSGKPFRELESELLSRRKKDLQQIYAEERENYLGKLEREITRFFVDRGFLEIKSPILIPLEYIERMGIDNDTELSKQIFRVDKNFCLRPMLAPNLMNYGRKLDRALPDPIKIFEIGPCYRKESDGKEHLEEFTMLNFTQMGSGCTRENLESIITDFLNHLGIDFKIVGDSCMVYGDTLDVMHGDLELSSAVVGPIPLDREWGIDKPWIGAGFGLERLLKVKHDFKNIKRAARSESYYNGISTNL

SEQ ID NO: 455 - DNA, 3288 bp, Artificial Sequence
  Description of Artificial Sequence: Synthetic polynucleotide
  TOM20::FUS::SYNZIP1::CpkRS
atggtgggtcggaacagcgccatcgccgccggtgtatgcggggcccttttcattgggtactgcatctacttcgaccgcaaaagacgaagtgaccccaacttcaagaacaggcttcgagaacgaagaaagaaacagaagcttgccaaggagagagctgggctttccaagttacctgaccttaaagatgctgaagctgttcagaaattcttcatggcctcaaacgattatacccaacaagcaacccaaagctatggggcctaccccacccagcccgggcagggctattcccagcagagcagtcagccctacggacagcagagttacagtggttatagccagtccacggacacttcaggatatggccagagcagctattcttcttatggccagagccagaacacaggctatggaactcagtcaactccccagggatatggctcgactggcggctatggcagtagccagagctcccaatcgtcttacgggcagcagtcctcctaccctggctatggccagcagccagctcccagcagcacctcgggaagttacggtagcagttctcagagcagcagctatgggcagccccagagtgggagctacagccagcagcctagctatggtggacagcagcaaagctatggacagcagcaaagctataatccccctcagggctatggacagcagaaccagtacaacagcagcagtggtggtggaggtggaggtggaggtggaggtaactatggccaagatcaatcctccatgagtagtggtggtggcagtggtggcggttatggcaatcaagaccagagtggtggaggtggcagcggtggctatggacagcaggaccgtggaggccgcggcaggggtggcagtggtggcggcggcggcggcggcggtggtggttacaaccgcagcagtggtggctatgaacccagaggtcgtggaggtggccgtggaggcagaggtggcatgggcggaagtgaccgtggtggcttcaataaatttggtggccctcgggaccaaggatcacgtcatgactccgaacaggataattcagacaacaacaccatctttgtgcaaggcctgggtgagaatgttacaattgagtctgtggctgattacttcaagcagattggtattattaagacaaacaagaaaacgggacagcccatgattaatttgtacacagacagggaaactggcaagctgaagggagaggcaacggtctcttttgatgacccaccttcagctaaagcagctattgactggtttgatggtaaagaattctccggaaatcctatcaaggtctcatttgctactcgccgggcagactttaatcggggtggtggcaatggtcgtggaggccgagggcgaggaggacccatgggccgtggaggctatggaggtggtggcagtggtggtggtggccgaggaggatttcccagtggaggtggtggcggtggaggacagcagcgagctggtgactggaagtgtcctaatcccacctgtgagaatatgaacttctcttggaggaatgaatgcaaccagtgtaaggcccctaaaccagatggcccaggagggggaccaggtggctctcacatggggggtaactacggggatgatcgtcgtggtggcagaggaggcgcgatcgcaaatctggtggcccagctggaaaacgaggtggccagcctggaaaacgagaacgaaaccctgaagaaaaagaacctgcacaagaaggacctgatcgcctacctggaaaaggaaatcgccaacctgagaaagaagatcgaggaaggcaagcctattcccaaccccctgctgggcctggatagcaccggagcaccaggaagtgctggttctgctgctggtagtggagcgtgcccggtgccgctgcagctgccgccgctggaacgcctgaccctggatgataaaaaaccgctgaataccctgatctctgctactggtctgtggatgagtcgtaccggaaccattcataaaatcaaacaccacgaggttagccgttcgaaaatctatattgagatggcgtgtggcgatcatctggttgtgaacaatagccgctcttctcgtacagcacgtgcactgcgtcaccacaaatatcgtaaaacctgtaaacgttgccgtgtgtccgatgaggatctgaacaaattcctgacaaaagccaatgaggaccaaacaagcgtgaaagtgaaagtcgttagcgctcctacccgtactaaaaaagcaatgccgaaatccgttgctcgtgcccctaaaccactggaaaacactgaagcagcacaggcacagccgtctggaagcaaattctctccggccattcctgtttctacccaggagtccgtttctgttccagcaagtgtgagcaccagcattagcagtattagcaccggtgccaccgctagcgccctggttaaaggcaataccaatccgattacaagcatgtctgccccggttcaagcatcagctccagcactgacaaaatcccaaaccgatcgtctggaggttctgctgaatccgaaagacgaaatcagcctgaattccggcaaaccgtttcgtgaactggagagcgaactgctgtcacgtcgtaaaaaagacctgcaacaaatctatgccgaagaacgtgagaactatctggggaaactggaacgtgaaatcacccgctttttcgtggatcgtggctttctggagatcaaatccccgattctgattcctctggagtatatcgagcgtatgggcatcgacaatgataccgaactgagcaaacaaattttccgtgtggataaaaacttctgtctgcgccctatgctttcaccaaatctgtataactatctgcgcaaactggaccgtgccctgcctgatcctatcaaaatcttcgagatcggcccgtgttatcgtaaagagtccgacggtaaagaacatctggaggagtttaccatgctgaacttttgccaaatgggttcaggttgtactcgtgagaacctggaaagcatcatcaccgattttctgaaccacctgggcattgacttcaaaattgtgggcgacagctgtatggtgtatggcgacaccctggatgtcatgcacggcgacctggaactgtctagtgccgttgttggaccaattccgctggaccgtgagtggggtatcgacaaaccgtggatcggagcaggattcggtctggaacgcctgctgaaagtgaaacacgacttcaaaaacatcaaacgtgccgcccgttctgaatcgtattataacgggatctctacgaacctgtaa

SEQ ID NO: 456 - protein, 1095 aa, Artificial Sequence
  Description of Artificial Sequence: Synthetic polypeptide
  TOM20::FUS::SYNZIP1::CpkRS
MVGRNSAIAAGVCGALFIGYCIYFDRKRRSDPNFKNRLRERRKKQKLAKERAGLSKLPDLKDAEAVQKFFMASNDYTQQATQSYGAYPTQPGQGYSQQSSQPYGQQSYSGYSQSTDTSGYGQSSYSSYGQSQNTGYGTQSTPQGYGSTGGYGSSQSSQSSYGQQSSYPGYGQQPAPSSTSGSYGSSSQSSSYGQPQSGSYSQQPSYGGQQQSYGQQQSYNPPQGYGQQNQYNSSSGGGGGGGGGGNYGQDQSSMSSGGGSGGGYGNQDQSGGGGSGGYGQQDRGGRGRGGSGGGGGGGGGGYNRSSGGYEPRGRGGGRGGRGGMGGSDRGGFNKFGGPRDQGSRHDSEQDNSDNNTIFVQGLGENVTIESVADYFKQIGIIKTNKKTGQPMINLYTDRETGKLKGEATVSFDDPPSAKAAIDWFDGKEFSGNPIKVSFATRRADFNRGGGNGRGGRGRGGPMGRGGYGGGGSGGGGRGGFPSGGGGGGGQQRAGDWKCPNPTCENMNFSWRNECNQCKAPKPDGPGGGPGGSHMGGNYGDDRRGGRGGAIANLVAQLENEVASLENENETLKKKNLHKKDLIAYLEKEIANLRKKIEEGKPIPNPLLGLDSTGAPGSAGSAAGSGACPVPLQLPPLERLTLDDKKPLNTLISATGLWMSRTGTIHKIKHHEVSRSKIYIEMACGDHLVVNNSRSSRTARALRHHKYRKTCKRCRVSDEDLNKFLTKANEDQTSVKVKVVSAPTRTKKAMPKSVARAPKPLENTEAAQAQPSGSKFSPAIPVSTQESVSVPASVSTSISSISTGATASALVKGNTNPITSMSAPVQASAPALTKSQTDRLEVLLNPKDEISLNSGKPFRELESELLSRRKKDLQQIYAEERENYLGKLEREITRFFVDRGFLEIKSPILIPLEYIERMGIDNDTELSKQIFRVDKNFCLRPMLSPNLYNYLRKLDRALPDPIKIFEIGPCYRKESDGKEHLEEFTMLNFCQMGSGCTRENLESIITDFLNHLGIDFKIVGDSCMVYGDTLDVMHGDLELSSAVVGPIPLDREWGIDKPWIGAGFGLERLLKVKHDFKNIKRAARSESYYNGISTNL

SEQ ID NO: 457 - DNA, 4188 bp, Artificial Sequence
  Description of Artificial Sequence: Synthetic polynucleotide
  KIF16B::FUS::CbzRS
atggcatcggtcaaggtggccgtgagggtccggcccatgaatcgcagggaaaaggacttggaggccaagttcattattcagatggagaaaagcaaaacgacaatcacaaacttaaagataccagaaggaggcactggggactcaggaagagaacggaccaagaccttcacctatgacttttctttttattctgctgatacaaaaagcccagattacgtttcacaagaaatggttttcaaaaccctcggcacagatgtcgtgaagtctgcatttgaaggttataatgcttgtgtctttgcatatgggcaaactggatctggaaagtcatacactatgatgggaaattctggagattctggcttaatacctcggatctgtgaaggactcttcagtcggataaatgaaaccaccagatgggatgaagcttcttttcgaactgaagtcagctacttagaaatttataacgaacgtgtgagagatctacttcggcggaagtcatctaaaaccttcaatttgagagtccgtgagcatcccaaagaaggcccttatgttgaggatttatccaaacatttagtacagaattatggtgacgtagaagaacttatggatgcgggcaatatcaaccggaccaccgcagcgactgggatgaacgacgtcagtagcaggtctcatgccatcttcaccatcaagttcactcaggctaaatttgattctgaaatgccatgtgaaaccgtcagtaagatccacttggttgatcttgccggaagtgagcgtgcagatgccaccggagccaccggggttaggctaaaggaagggggaaatattaacaagtccctcgtgactctggggaacgtcatttctgccttagctgatttatctcaggatgctgcaaatactcttgcaaagaagaagcaagttttcgtgccttacagggattctgtgttgacttggttgttaaaagatagccttggaggaaactctaaaactatcatgattgccaccatttcacctgctgatgtcaattatggagaaaccctaagtactcttcgctatgcaaatagagccaaaaacatcatcaacaagcctaccattaatgaggatgccaacgtcaaacttatccgtgagctgcgagctgaaatagccagactgaaaacgctgcttgctcaagggaatcagattgccctcttagactcccccacatatacagatattgaaatgaacagattgggaaagggcgcccccggctccgccggctccgccgccggctccggcatggcctcaaacgattatacccaacaagcaacccaaagctatggggcctaccccacccagcccgggcagggctattcccagcagagcagtcagccctacggacagcagagttacagtggttatagccagtccacggacacttcaggatatggccagagcagctattcttcttatggccagagccagaacacaggctatggaactcagtcaactccccagggatatggctcgactggcggctatggcagtagccagagctcccaatcgtcttacgggcagcagtcctcctaccctggctatggccagcagccagctcccagcagcacctcgggaagttacggtagcagttctcagagcagcagctatgggcagccccagagtgggagctacagccagcagcctagctatggtggacagcagcaaagctatggacagcagcaaagctataatccccctcagggctatggacagcagaaccagtacaacagcagcagtggtggtggaggtggaggtggaggtggaggtaactatggccaagatcaatcctccatgagtagtggtggtggcagtggtggcggttatggcaatcaagaccagagtggtggaggtggcagcggtggctatggacagcaggaccgtggaggccgcggcaggggtggcagtggtggcggcggcggcggcggcggtggtggttacaaccgcagcagtggtggctatgaacccagaggtcgtggaggtggccgtggaggcagaggtggcatgggcggaagtgaccgtggtggcttcaataaatttggtggccctcgggaccaaggatcacgtcatgactccgaacaggataattcagacaacaacaccatctttgtgcaaggcctgggtgagaatgttacaattgagtctgtggctgattacttcaagcagattggtattattaagacaaacaagaaaacgggacagcccatgattaatttgtacacagacagggaaactggcaagctgaagggagaggcaacggtctcttttgatgacccaccttcagctaaagcagctattgactggtttgatggtaaagaattctccggaaatcctatcaaggtctcatttgctactcgccgggcagactttaatcggggtggtggcaatggtcgtggaggccgagggcgaggaggacccatgggccgtggaggctatggaggtggtggcagtggtggtggtggccgaggaggatttcccagtggaggtggtggcggtggaggacagcagcgagctggtgactggaagtgtcctaatcccacctgtgagaatatgaacttctcttggaggaatgaatgcaaccagtgtaaggcccctaaaccagatggcccaggagggggaccaggtggctctcacatggggggtaactacggggatgatcgtcgtggtggcagaggaggcgattacaaggatgacgacgataagggtaccggcgcccccggctccgccggctccgccgccggctccggcgcgtgcccggtgccgctgcagctgccgccgctggaacgcctgaccctggatgataaaaaaccgctgaataccctgatctctgctactggtctgtggatgagtcgtaccggaaccattcataaaatcaaacaccacgaggttagccgttcgaaaatctatattgagatggcgtgtggcgatcatctggttgtgaacaatagccgctcttctcgtacagcacgtgcactgcgtcaccacaaatatcgtaaaacctgtaaacgttgccgtgtgtccgatgaggatctgaacaaattcctgacaaaagccaatgaggaccaaacaagcgtgaaagtgaaagtcgttagcgctcctacccgtactaaaaaagcaatgccgaaatccgttgctcgtgcccctaaaccactggaaaacactgaagcagcacaggcacagccgtctggaagcaaattctctccggccattcctgtttctacccaggagtccgtttctgttccagcaagtgtgagcaccagcattagcagtattagcaccggtgccaccgctagcgccctggttaaaggcaataccaatccgattacaagcatgtctgccccggttcaagcatcagctccagcactgacaaaatcccaaaccgatcgtctggaggttctgctgaatccgaaagacgaaatcagcctgaattccggcaaaccgtttcgtgaactggagagcgaactgctgtcacgtcgtaaaaaagacctgcaacaaatctatgccgaagaacgtgagaactatctggggaaactggaacgtgaaatcacccgctttttcgtggatcgtggctttctggagatcaaatccccgattctgattcctctggagtatatcgagcgtatgggcatcgacaatgataccgaactgagcaaacaaattttccgtgtggataaaaacttctgtctgcgccctatgcttgcaccaaatctgatgaactatggacgcaaactggaccgtgccctgcctgatcctatcaaaatcttcgagatcggcccgtgttatcgtaaagagtccgacggtaaagaacatctggaggagtttaccatgctgaactttacacaaatgggttcaggttgtactcgtgagaacctggaaagcatcatcaccgattttctgaaccacctgggcattgacttcaaaattgtgggcgacagctgtatggtgtatggcgacaccctggatgtcatgcacggcgacctggaactgtctagtgccgttgttggaccaattccgctggaccgtgagtggggtatcgacaaaccgtggatcggagcaggattcggtctggaacgcctgctgaaagtgaaacacgacttcaaaaacatcaaacgtgccgcccgttctgaatcgtattataacgggatctctacgaacctgtaa

SEQ ID NO: 458 - protein, 1395 aa, Artificial Sequence
  Description of Artificial Sequence: Synthetic polypeptide
  KIF16B::FUS::CbzRS
MASVKVAVRVRPMNRREKDLEAKFIIQMEKSKTTITNLKIPEGGTGDSGRERTKTFTYDFSFYSADTKSPDYVSQEMVFKTLGTDVVKSAFEGYNACVFAYGQTGSGKSYTMMGNSGDSGLIPRICEGLFSRINETTRWDEASFRTEVSYLEIYNERVRDLLRRKSSKTFNLRVREHPKEGPYVEDLSKHLVQNYGDVEELMDAGNINRTTAATGMNDVSSRSHAIFTIKFTQAKFDSEMPCETVSKIHLVDLAGSERADATGATGVRLKEGGNINKSLVTLGNVISALADLSQDAANTLAKKKQVFVPYRDSVLTWLLKDSLGGNSKTIMIATISPADVNYGETLSTLRYANRAKNIINKPTINEDANVKLIRELRAEIARLKTLLAQGNQIALLDSPTYTDIEMNRLGKGAPGSAGSAAGSGMASNDYTQQATQSYGAYPTQPGQGYSQQSSQPYGQQSYSGYSQSTDTSGYGQSSYSSYGQSQNTGYGTQSTPQGYGSTGGYGSSQSSQSSYGQQSSYPGYGQQPAPSSTSGSYGSSSQSSSYGQPQSGSYSQQPSYGGQQQSYGQQQSYNPPQGYGQQNQYNSSSGGGGGGGGGGNYGQDQSSMSSGGGSGGGYGNQDQSGGGGSGGYGQQDRGGRGRGGSGGGGGGGGGGYNRSSGGYEPRGRGGGRGGRGGMGGSDRGGFNKFGGPRDQGSRHDSEQDNSDNNTIFVQGLGENVTIESVADYFKQIGIIKTNKKTGQPMINLYTDRETGKLKGEATVSFDDPPSAKAAIDWFDGKEFSGNPIKVSFATRRADFNRGGGNGRGGRGRGGPMGRGGYGGGGSGGGGRGGFPSGGGGGGGQQRAGDWKCPNPTCENMNFSWRNECNQCKAPKPDGPGGGPGGSHMGGNYGDDRRGGRGGDYKDDDDKGTGAPGSAGSAAGSGACPVPLQLPPLERLTLDDKKPLNTLISATGLWMSRTGTIHKIKHHEVSRSKIYIEMACGDHLVVNNSRSSRTARALRHHKYRKTCKRCRVSDEDLNKFLTKANEDQTSVKVKVVSAPTRTKKAMPKSVARAPKPLENTEAAQAQPSGSKFSPAIPVSTQESVSVPASVSTSISSISTGATASALVKGNTNPITSMSAPVQASAPALTKSQTDRLEVLLNPKDEISLNSGKPFRELESELLSRRKKDLQQIYAEERENYLGKLEREITRFFVDRGFLEIKSPILIPLEYIERMGIDNDTELSKQIFRVDKNFCLRPMLAPNLMNYGRKLDRALPDPIKIFEIGPCYRKESDGKEHLEEFTMLNFTQMGSGCTRENLESIITDFLNHLGIDFKIVGDSCMVYGDTLDVMHGDLELSSAVVGPIPLDREWGIDKPWIGAGFGLERLLKVKHDFKNIKRAARSESYYNGISTNL

SEQ ID NO: 459 - DNA, 3051 bp, Artificial Sequence
  Description of Artificial Sequence: Synthetic polynucleotide
  EBAG91-29::FUS::CpkRS
atggccatcacccagtttcggttatttaaattttgtacctgcctagcaacagtattctcattcctaaagagattaatatgcagatctggagcacccggctccgccggctccgccgccggctccggcatggcctcaaacgattatacccaacaagcaacccaaagctatggggcctaccccacccagcccgggcagggctattcccagcagagcagtcagccctacggacagcagagttacagtggttatagccagtccacggacacttcaggatatggccagagcagctattcttcttatggccagagccagaacacaggctatggaactcagtcaactccccagggatatggctcgactggcggctatggcagtagccagagctcccaatcgtcttacgggcagcagtcctcctaccctggctatggccagcagccagctcccagcagcacctcgggaagttacggtagcagttctcagagcagcagctatgggcagccccagagtgggagctacagccagcagcctagctatggtggacagcagcaaagctatggacagcagcaaagctataatccccctcagggctatggacagcagaaccagtacaacagcagcagtggtggtggaggtggaggtggaggtggaggtaactatggccaagatcaatcctccatgagtagtggtggtggcagtggtggcggttatggcaatcaagaccagagtggtggaggtggcagcggtggctatggacagcaggaccgtggaggccgcggcaggggtggcagtggtggcggcggcggcggcggcggtggtggttacaaccgcagcagtggtggctatgaacccagaggtcgtggaggtggccgtggaggcagaggtggcatgggcggaagtgaccgtggtggcttcaataaatttggtggccctcgggaccaaggatcacgtcatgactccgaacaggataattcagacaacaacaccatctttgtgcaaggcctgggtgagaatgttacaattgagtctgtggctgattacttcaagcagattggtattattaagacaaacaagaaaacgggacagcccatgattaatttgtacacagacagggaaactggcaagctgaagggagaggcaacggtctcttttgatgacccaccttcagctaaagcagctattgactggtttgatggtaaagaattctccggaaatcctatcaaggtctcatttgctactcgccgggcagactttaatcggggtggtggcaatggtcgtggaggccgagggcgaggaggacccatgggccgtggaggctatggaggtggtggcagtggtggtggtggccgaggaggatttcccagtggaggtggtggcggtggaggacagcagcgagctggtgactggaagtgtcctaatcccacctgtgagaatatgaacttctcttggaggaatgaatgcaaccagtgtaaggcccctaaaccagatggcccaggagggggaccaggtggctctcacatggggggtaactacggggatgatcgtcgtggtggcagaggtggtgcgatcgcaggcgccgattacaaggacgatgatgacaagggagcaccaggaagtgctggttctgctgctggtagtggagcgtgcccggtgccgctgcagctgccgccgctggaacgcctgaccctggatgataaaaaaccgctgaataccctgatctctgctactggtctgtggatgagtcgtaccggaaccattcataaaatcaaacaccacgaggttagccgttcgaaaatctatattgagatggcgtgtggcgatcatctggttgtgaacaatagccgctcttctcgtacagcacgtgcactgcgtcaccacaaatatcgtaaaacctgtaaacgttgccgtgtgtccgatgaggatctgaacaaattcctgacaaaagccaatgaggaccaaacaagcgtgaaagtgaaagtcgttagcgctcctacccgtactaaaaaagcaatgccgaaatccgttgctcgtgcccctaaaccactggaaaacactgaagcagcacaggcacagccgtctggaagcaaattctctccggccattcctgtttctacccaggagtccgtttctgttccagcaagtgtgagcaccagcattagcagtattagcaccggtgccaccgctagcgccctggttaaaggcaataccaatccgattacaagcatgtctgccccggttcaagcatcagctccagcactgacaaaatcccaaaccgatcgtctggaggttctgctgaatccgaaagacgaaatcagcctgaattccggcaaaccgtttcgtgaactggagagcgaactgctgtcacgtcgtaaaaaagacctgcaacaaatctatgccgaagaacgtgagaactatctggggaaactggaacgtgaaatcacccgctttttcgtggatcgtggctttctggagatcaaatccccgattctgattcctctggagtatatcgagcgtatgggcatcgacaatgataccgaactgagcaaacaaattttccgtgtggataaaaacttctgtctgcgccctatgctttcaccaaatctgtataactatctgcgcaaactggaccgtgccctgcctgatcctatcaaaatcttcgagatcggcccgtgttatcgtaaagagtccgacggtaaagaacatctggaggagtttaccatgctgaacttttgccaaatgggttcaggttgtactcgtgagaacctggaaagcatcatcaccgattttctgaaccacctgggcattgacttcaaaattgtgggcgacagctgtatggtgtatggcgacaccctggatgtcatgcacggcgacctggaactgtctagtgccgttgttggaccaattccgctggaccgtgagtggggtatcgacaaaccgtggatcggagcaggattcggtctggaacgcctgctgaaagtgaaacacgacttcaaaaacatcaaacgtgccgcccgttctgaatcgtattataacgggatctctacgaacctgtaa

SEQ ID NO: 460 - protein, 1016 aa, Artificial Sequence
  Description of Artificial Sequence: Synthetic polypeptide
  EBAG91-29::FUS::CpkRS
MAITQFRLFKFCTCLATVFSFLKRLICRSGAPGSAGSAAGSGMASNDYTQQATQSYGAYPTQPGQGYSQQSSQPYGQQSYSGYSQSTDTSGYGQSSYSSYGQSQNTGYGTQSTPQGYGSTGGYGSSQSSQSSYGQQSSYPGYGQQPAPSSTSGSYGSSSQSSSYGQPQSGSYSQQPSYGGQQQSYGQQQSYNPPQGYGQQNQYNSSSGGGGGGGGGGNYGQDQSSMSSGGGSGGGYGNQDQSGGGGSGGYGQQDRGGRGRGGSGGGGGGGGGGYNRSSGGYEPRGRGGGRGGRGGMGGSDRGGFNKFGGPRDQGSRHDSEQDNSDNNTIFVQGLGENVTIESVADYFKQIGIIKTNKKTGQPMINLYTDRETGKLKGEATVSFDDPPSAKAAIDWFDGKEFSGNPIKVSFATRRADFNRGGGNGRGGRGRGGPMGRGGYGGGGSGGGGRGGFPSGGGGGGGQQRAGDWKCPNPTCENMNFSWRNECNQCKAPKPDGPGGGPGGSHMGGNYGDDRRGGRGGAIAGADYKDDDDKGAPGSAGSAAGSGACPVPLQLPPLERLTLDDKKPLNTLISATGLWMSRTGTIHKIKHHEVSRSKIYIEMACGDHLVVNNSRSSRTARALRHHKYRKTCKRCRVSDEDLNKFLTKANEDQTSVKVKVVSAPTRTKKAMPKSVARAPKPLENTEAAQAQPSGSKFSPAIPVSTQESVSVPASVSTSISSISTGATASALVKGNTNPITSMSAPVQASAPALTKSQTDRLEVLLNPKDEISLNSGKPFRELESELLSRRKKDLQQIYAEERENYLGKLEREITRFFVDRGFLEIKSPILIPLEYIERMGIDNDTELSKQIFRVDKNFCLRPMLSPNLYNYLRKLDRALPDPIKIFEIGPCYRKESDGKEHLEEFTMLNFCQMGSGCTRENLESIITDFLNHLGIDFKIVGDSCMVYGDTLDVMHGDLELSSAVVGPIPLDREWGIDKPWIGAGFGLERLLKVKHDFKNIKRAARSESYYNGISTNL

SEQ ID NO: 461 - DNA, 3147 bp, Artificial Sequence
  Description of Artificial Sequence: Synthetic polynucleotide
  TOM20::FUS::CbzRS
atggtgggtcggaacagcgccatcgccgccggtgtatgcggggcccttttcattgggtactgcatctacttcgaccgcaaaagacgaagtgaccccaacttcaagaacaggcttcgagaacgaagaaagaaacagaagcttgccaaggagagagctgggctttccaagttacctgaccttaaagatgctgaagctgttcagaaattcttcatggcctcaaacgattatacccaacaagcaacccaaagctatggggcctaccccacccagcccgggcagggctattcccagcagagcagtcagccctacggacagcagagttacagtggttatagccagtccacggacacttcaggatatggccagagcagctattcttcttatggccagagccagaacacaggctatggaactcagtcaactccccagggatatggctcgactggcggctatggcagtagccagagctcccaatcgtcttacgggcagcagtcctcctaccctggctatggccagcagccagctcccagcagcacctcgggaagttacggtagcagttctcagagcagcagctatgggcagccccagagtgggagctacagccagcagcctagctatggtggacagcagcaaagctatggacagcagcaaagctataatccccctcagggctatggacagcagaaccagtacaacagcagcagtggtggtggaggtggaggtggaggtggaggtaactatggccaagatcaatcctccatgagtagtggtggtggcagtggtggcggttatggcaatcaagaccagagtggtggaggtggcagcggtggctatggacagcaggaccgtggaggccgcggcaggggtggcagtggtggcggcggcggcggcggcggtggtggttacaaccgcagcagtggtggctatgaacccagaggtcgtggaggtggccgtggaggcagaggtggcatgggcggaagtgaccgtggtggcttcaataaatttggtggccctcgggaccaaggatcacgtcatgactccgaacaggataattcagacaacaacaccatctttgtgcaaggcctgggtgagaatgttacaattgagtctgtggctgattacttcaagcagattggtattattaagacaaacaagaaaacgggacagcccatgattaatttgtacacagacagggaaactggcaagctgaagggagaggcaacggtctcttttgatgacccaccttcagctaaagcagctattgactggtttgatggtaaagaattctccggaaatcctatcaaggtctcatttgctactcgccgggcagactttaatcggggtggtggcaatggtcgtggaggccgagggcgaggaggacccatgggccgtggaggctatggaggtggtggcagtggtggtggtggccgaggaggatttcccagtggaggtggtggcggtggaggacagcagcgagctggtgactggaagtgtcctaatcccacctgtgagaatatgaacttctcttggaggaatgaatgcaaccagtgtaaggcccctaaaccagatggcccaggagggggaccaggtggctctcacatggggggtaactacggggatgatcgtcgtggtggcagaggaggcgcgatcgcaggcaagcctattcccaaccccctgctgggcctggatagcaccggagcaccaggaagtgctggttctgctgctggtagtggagcgtgcccggtgccgctgcagctgccgccgctggaacgcctgaccctggatgataaaaaaccgctgaataccctgatctctgctactggtctgtggatgagtcgtaccggaaccattcataaaatcaaacaccacgaggttagccgttcgaaaatctatattgagatggcgtgtggcgatcatctggttgtgaacaatagccgctcttctcgtacagcacgtgcactgcgtcaccacaaatatcgtaaaacctgtaaacgttgccgtgtgtccgatgaggatctgaacaaattcctgacaaaagccaatgaggaccaaacaagcgtgaaagtgaaagtcgttagcgctcctacccgtactaaaaaagcaatgccgaaatccgttgctcgtgcccctaaaccactggaaaacactgaagcagcacaggcacagccgtctggaagcaaattctctccggccattcctgtttctacccaggagtccgtttctgttccagcaagtgtgagcaccagcattagcagtattagcaccggtgccaccgctagcgccctggttaaaggcaataccaatccgattacaagcatgtctgccccggttcaagcatcagctccagcactgacaaaatcccaaaccgatcgtctggaggttctgctgaatccgaaagacgaaatcagcctgaattccggcaaaccgtttcgtgaactggagagcgaactgctgtcacgtcgtaaaaaagacctgcaacaaatctatgccgaagaacgtgagaactatctggggaaactggaacgtgaaatcacccgctttttcgtggatcgtggctttctggagatcaaatccccgattctgattcctctggagtatatcgagcgtatgggcatcgacaatgataccgaactgagcaaacaaattttccgtgtggataaaaacttctgtctgcgccctatgcttgcaccaaatctgatgaactatggacgcaaactggaccgtgccctgcctgatcctatcaaaatcttcgagatcggcccgtgttatcgtaaagagtccgacggtaaagaacatctggaggagtttaccatgctgaactttacacaaatgggttcaggttgtactcgtgagaacctggaaagcatcatcaccgattttctgaaccacctgggcattgacttcaaaattgtgggcgacagctgtatggtgtatggcgacaccctggatgtcatgcacggcgacctggaactgtctagtgccgttgttggaccaattccgctggaccgtgagtggggtatcgacaaaccgtggatcggagcaggattcggtctggaacgcctgctgaaagtgaaacacgacttcaaaaacatcaaacgtgccgcccgttctgaatcgtattataacgggatctctacgaacctgtaa

SEQ ID NO: 462 - protein, 1048 aa, Artificial Sequence
  Description of Artificial Sequence: Synthetic polypeptide
  TOM20::FUS::CbzRS
MVGRNSAIAAGVCGALFIGYCIYFDRKRRSDPNFKNRLRERRKKQKLAKERAGLSKLPDLKDAEAVQKFFMASNDYTQQATQSYGAYPTQPGQGYSQQSSQPYGQQSYSGYSQSTDTSGYGQSSYSSYGQSQNTGYGTQSTPQGYGSTGGYGSSQSSQSSYGQQSSYPGYGQQPAPSSTSGSYGSSSQSSSYGQPQSGSYSQQPSYGGQQQSYGQQQSYNPPQGYGQQNQYNSSSGGGGGGGGGGNYGQDQSSMSSGGGSGGGYGNQDQSGGGGSGGYGQQDRGGRGRGGSGGGGGGGGGGYNRSSGGYEPRGRGGGRGGRGGMGGSDRGGFNKFGGPRDQGSRHDSEQDNSDNNTIFVQGLGENVTIESVADYFKQIGIIKTNKKTGQPMINLYTDRETGKLKGEATVSFDDPPSAKAAIDWFDGKEFSGNPIKVSFATRRADFNRGGGNGRGGRGRGGPMGRGGYGGGGSGGGGRGGFPSGGGGGGGQQRAGDWKCPNPTCENMNFSWRNECNQCKAPKPDGPGGGPGGSHMGGNYGDDRRGGRGGAIAGKPIPNPLLGLDSTGAPGSAGSAAGSGACPVPLQLPPLERLTLDDKKPLNTLISATGLWMSRTGTIHKIKHHEVSRSKIYIEMACGDHLVVNNSRSSRTARALRHHKYRKTCKRCRVSDEDLNKFLTKANEDQTSVKVKVVSAPTRTKKAMPKSVARAPKPLENTEAAQAQPSGSKFSPAIPVSTQESVSVPASVSTSISSISTGATASALVKGNTNPITSMSAPVQASAPALTKSQTDRLEVLLNPKDEISLNSGKPFRELESELLSRRKKDLQQIYAEERENYLGKLEREITRFFVDRGFLEIKSPILIPLEYIERMGIDNDTELSKQIFRVDKNFCLRPMLAPNLMNYGRKLDRALPDPIKIFEIGPCYRKESDGKEHLEEFTMLNFTQMGSGCTRENLESIITDFLNHLGIDFKIVGDSCMVYGDTLDVMHGDLELSSAVVGPIPLDREWGIDKPWIGAGFGLERLLKVKHDFKNIKRAARSESYYNGISTNL

SEQ ID NO: 463 - DNA, 3051 bp, Artificial Sequence
  Description of Artificial Sequence: Synthetic polynucleotide
  EBAG91-29::FUS::CbzRS
atggccatcacccagtttcggttatttaaattttgtacctgcctagcaacagtattctcattcctaaagagattaatatgcagatctggagcacccggctccgccggctccgccgccggctccggcatggcctcaaacgattatacccaacaagcaacccaaagctatggggcctaccccacccagcccgggcagggctattcccagcagagcagtcagccctacggacagcagagttacagtggttatagccagtccacggacacttcaggatatggccagagcagctattcttcttatggccagagccagaacacaggctatggaactcagtcaactccccagggatatggctcgactggcggctatggcagtagccagagctcccaatcgtcttacgggcagcagtcctcctaccctggctatggccagcagccagctcccagcagcacctcgggaagttacggtagcagttctcagagcagcagctatgggcagccccagagtgggagctacagccagcagcctagctatggtggacagcagcaaagctatggacagcagcaaagctataatccccctcagggctatggacagcagaaccagtacaacagcagcagtggtggtggaggtggaggtggaggtggaggtaactatggccaagatcaatcctccatgagtagtggtggtggcagtggtggcggttatggcaatcaagaccagagtggtggaggtggcagcggtggctatggacagcaggaccgtggaggccgcggcaggggtggcagtggtggcggcggcggcggcggcggtggtggttacaaccgcagcagtggtggctatgaacccagaggtcgtggaggtggccgtggaggcagaggtggcatgggcggaagtgaccgtggtggcttcaataaatttggtggccctcgggaccaaggatcacgtcatgactccgaacaggataattcagacaacaacaccatctttgtgcaaggcctgggtgagaatgttacaattgagtctgtggctgattacttcaagcagattggtattattaagacaaacaagaaaacgggacagcccatgattaatttgtacacagacagggaaactggcaagctgaagggagaggcaacggtctcttttgatgacccaccttcagctaaagcagctattgactggtttgatggtaaagaattctccggaaatcctatcaaggtctcatttgctactcgccgggcagactttaatcggggtggtggcaatggtcgtggaggccgagggcgaggaggacccatgggccgtggaggctatggaggtggtggcagtggtggtggtggccgaggaggatttcccagtggaggtggtggcggtggaggacagcagcgagctggtgactggaagtgtcctaatcccacctgtgagaatatgaacttctcttggaggaatgaatgcaaccagtgtaaggcccctaaaccagatggcccaggagggggaccaggtggctctcacatggggggtaactacggggatgatcgtcgtggtggcagaggtggtgcgatcgcaggcgccgattacaaggacgatgatgacaagggagcaccaggaagtgctggttctgctgctggtagtggagcgtgcccggtgccgctgcagctgccgccgctggaacgcctgaccctggatgataaaaaaccgctgaataccctgatctctgctactggtctgtggatgagtcgtaccggaaccattcataaaatcaaacaccacgaggttagccgttcgaaaatctatattgagatggcgtgtggcgatcatctggttgtgaacaatagccgctcttctcgtacagcacgtgcactgcgtcaccacaaatatcgtaaaacctgtaaacgttgccgtgtgtccgatgaggatctgaacaaattcctgacaaaagccaatgaggaccaaacaagcgtgaaagtgaaagtcgttagcgctcctacccgtactaaaaaagcaatgccgaaatccgttgctcgtgcccctaaaccactggaaaacactgaagcagcacaggcacagccgtctggaagcaaattctctccggccattcctgtttctacccaggagtccgtttctgttccagcaagtgtgagcaccagcattagcagtattagcaccggtgccaccgctagcgccctggttaaaggcaataccaatccgattacaagcatgtctgccccggttcaagcatcagctccagcactgacaaaatcccaaaccgatcgtctggaggttctgctgaatccgaaagacgaaatcagcctgaattccggcaaaccgtttcgtgaactggagagcgaactgctgtcacgtcgtaaaaaagacctgcaacaaatctatgccgaagaacgtgagaactatctggggaaactggaacgtgaaatcacccgctttttcgtggatcgtggctttctggagatcaaatccccgattctgattcctctggagtatatcgagcgtatgggcatcgacaatgataccgaactgagcaaacaaattttccgtgtggataaaaacttctgtctgcgccctatgcttgcaccaaatctgatgaactatggacgcaaactggaccgtgccctgcctgatcctatcaaaatcttcgagatcggcccgtgttatcgtaaagagtccgacggtaaagaacatctggaggagtttaccatgctgaactttacacaaatgggttcaggttgtactcgtgagaacctggaaagcatcatcaccgattttctgaaccacctgggcattgacttcaaaattgtgggcgacagctgtatggtgtatggcgacaccctggatgtcatgcacggcgacctggaactgtctagtgccgttgttggaccaattccgctggaccgtgagtggggtatcgacaaaccgtggatcggagcaggattcggtctggaacgcctgctgaaagtgaaacacgacttcaaaaacatcaaacgtgccgcccgttctgaatcgtattataacgggatctctacgaacctgtaa

SEQ ID NO: 464 - protein, 1016 aa, Artificial Sequence
  Description of Artificial Sequence: Synthetic polypeptide
  EBAG91-29::FUS::CbzRS
MAITQFRLFKFCTCLATVFSFLKRLICRSGAPGSAGSAAGSGMASNDYTQQATQSYGAYPTQPGQGYSQQSSQPYGQQSYSGYSQSTDTSGYGQSSYSSYGQSQNTGYGTQSTPQGYGSTGGYGSSQSSQSSYGQQSSYPGYGQQPAPSSTSGSYGSSSQSSSYGQPQSGSYSQQPSYGGQQQSYGQQQSYNPPQGYGQQNQYNSSSGGGGGGGGGGNYGQDQSSMSSGGGSGGGYGNQDQSGGGGSGGYGQQDRGGRGRGGSGGGGGGGGGGYNRSSGGYEPRGRGGGRGGRGGMGGSDRGGFNKFGGPRDQGSRHDSEQDNSDNNTIFVQGLGENVTIESVADYFKQIGIIKTNKKTGQPMINLYTDRETGKLKGEATVSFDDPPSAKAAIDWFDGKEFSGNPIKVSFATRRADFNRGGGNGRGGRGRGGPMGRGGYGGGGSGGGGRGGFPSGGGGGGGQQRAGDWKCPNPTCENMNFSWRNECNQCKAPKPDGPGGGPGGSHMGGNYGDDRRGGRGGAIAGADYKDDDDKGAPGSAGSAAGSGACPVPLQLPPLERLTLDDKKPLNTLISATGLWMSRTGTIHKIKHHEVSRSKIYIEMACGDHLVVNNSRSSRTARALRHHKYRKTCKRCRVSDEDLNKFLTKANEDQTSVKVKVVSAPTRTKKAMPKSVARAPKPLENTEAAQAQPSGSKFSPAIPVSTQESVSVPASVSTSISSISTGATASALVKGNTNPITSMSAPVQASAPALTKSQTDRLEVLLNPKDEISLNSGKPFRELESELLSRRKKDLQQIYAEERENYLGKLEREITRFFVDRGFLEIKSPILIPLEYIERMGIDNDTELSKQIFRVDKNFCLRPMLAPNLMNYGRKLDRALPDPIKIFEIGPCYRKESDGKEHLEEFTMLNFTQMGSGCTRENLESIITDFLNHLGIDFKIVGDSCMVYGDTLDVMHGDLELSSAVVGPIPLDREWGIDKPWIGAGFGLERLLKVKHDFKNIKRAARSESYYNGISTNL

SEQ ID NO: 465 - DNA, 3288 bp, Artificial Sequence
  Description of Artificial Sequence: Synthetic polynucleotide
  TOM20::FUS::SYNZIP1::CbzRS
atggtgggtcggaacagcgccatcgccgccggtgtatgcggggcccttttcattgggtactgcatctacttcgaccgcaaaagacgaagtgaccccaacttcaagaacaggcttcgagaacgaagaaagaaacagaagcttgccaaggagagagctgggctttccaagttacctgaccttaaagatgctgaagctgttcagaaattcttcatggcctcaaacgattatacccaacaagcaacccaaagctatggggcctaccccacccagcccgggcagggctattcccagcagagcagtcagccctacggacagcagagttacagtggttatagccagtccacggacacttcaggatatggccagagcagctattcttcttatggccagagccagaacacaggctatggaactcagtcaactccccagggatatggctcgactggcggctatggcagtagccagagctcccaatcgtcttacgggcagcagtcctcctaccctggctatggccagcagccagctcccagcagcacctcgggaagttacggtagcagttctcagagcagcagctatgggcagccccagagtgggagctacagccagcagcctagctatggtggacagcagcaaagctatggacagcagcaaagctataatccccctcagggctatggacagcagaaccagtacaacagcagcagtggtggtggaggtggaggtggaggtggaggtaactatggccaagatcaatcctccatgagtagtggtggtggcagtggtggcggttatggcaatcaagaccagagtggtggaggtggcagcggtggctatggacagcaggaccgtggaggccgcggcaggggtggcagtggtggcggcggcggcggcggcggtggtggttacaaccgcagcagtggtggctatgaacccagaggtcgtggaggtggccgtggaggcagaggtggcatgggcggaagtgaccgtggtggcttcaataaatttggtggccctcgggaccaaggatcacgtcatgactccgaacaggataattcagacaacaacaccatctttgtgcaaggcctgggtgagaatgttacaattgagtctgtggctgattacttcaagcagattggtattattaagacaaacaagaaaacgggacagcccatgattaatttgtacacagacagggaaactggcaagctgaagggagaggcaacggtctcttttgatgacccaccttcagctaaagcagctattgactggtttgatggtaaagaattctccggaaatcctatcaaggtctcatttgctactcgccgggcagactttaatcggggtggtggcaatggtcgtggaggccgagggcgaggaggacccatgggccgtggaggctatggaggtggtggcagtggtggtggtggccgaggaggatttcccagtggaggtggtggcggtggaggacagcagcgagctggtgactggaagtgtcctaatcccacctgtgagaatatgaacttctcttggaggaatgaatgcaaccagtgtaaggcccctaaaccagatggcccaggagggggaccaggtggctctcacatggggggtaactacggggatgatcgtcgtggtggcagaggaggcgcgatcgcaaatctggtggcccagctggaaaacgaggtggccagcctggaaaacgagaacgaaaccctgaagaaaaagaacctgcacaagaaggacctgatcgcctacctggaaaaggaaatcgccaacctgagaaagaagatcgaggaaggcaagcctattcccaaccccctgctgggcctggatagcaccggagcaccaggaagtgctggttctgctgctggtagtggagcgtgcccggtgccgctgcagctgccgccgctggaacgcctgaccctggatgataaaaaaccgctgaataccctgatctctgctactggtctgtggatgagtcgtaccggaaccattcataaaatcaaacaccacgaggttagccgttcgaaaatctatattgagatggcgtgtggcgatcatctggttgtgaacaatagccgctcttctcgtacagcacgtgcactgcgtcaccacaaatatcgtaaaacctgtaaacgttgccgtgtgtccgatgaggatctgaacaaattcctgacaaaagccaatgaggaccaaacaagcgtgaaagtgaaagtcgttagcgctcctacccgtactaaaaaagcaatgccgaaatccgttgctcgtgcccctaaaccactggaaaacactgaagcagcacaggcacagccgtctggaagcaaattctctccggccattcctgtttctacccaggagtccgtttctgttccagcaagtgtgagcaccagcattagcagtattagcaccggtgccaccgctagcgccctggttaaaggcaataccaatccgattacaagcatgtctgccccggttcaagcatcagctccagcactgacaaaatcccaaaccgatcgtctggaggttctgctgaatccgaaagacgaaatcagcctgaattccggcaaaccgtttcgtgaactggagagcgaactgctgtcacgtcgtaaaaaagacctgcaacaaatctatgccgaagaacgtgagaactatctggggaaactggaacgtgaaatcacccgctttttcgtggatcgtggctttctggagatcaaatccccgattctgattcctctggagtatatcgagcgtatgggcatcgacaatgataccgaactgagcaaacaaattttccgtgtggataaaaacttctgtctgcgccctatgcttgcaccaaatctgatgaactatggacgcaaactggaccgtgccctgcctgatcctatcaaaatcttcgagatcggcccgtgttatcgtaaagagtccgacggtaaagaacatctggaggagtttaccatgctgaactttacacaaatgggttcaggttgtactcgtgagaacctggaaagcatcatcaccgattttctgaaccacctgggcattgacttcaaaattgtgggcgacagctgtatggtgtatggcgacaccctggatgtcatgcacggcgacctggaactgtctagtgccgttgttggaccaattccgctggaccgtgagtggggtatcgacaaaccgtggatcggagcaggattcggtctggaacgcctgctgaaagtgaaacacgacttcaaaaacatcaaacgtgccgcccgttctgaatcgtattataacgggatctctacgaacctgtaa

SEQ ID NO: 466 - protein, 1095 aa, Artificial Sequence
  Description of Artificial Sequence: Synthetic polypeptide
  TOM20::FUS::SYNZIP1::CbzRS
MVGRNSAIAAGVCGALFIGYCIYFDRKRRSDPNFKNRLRERRKKQKLAKERAGLSKLPDLKDAEAVQKFFMASNDYTQQATQSYGAYPTQPGQGYSQQSSQPYGQQSYSGYSQSTDTSGYGQSSYSSYGQSQNTGYGTQSTPQGYGSTGGYGSSQSSQSSYGQQSSYPGYGQQPAPSSTSGSYGSSSQSSSYGQPQSGSYSQQPSYGGQQQSYGQQQSYNPPQGYGQQNQYNSSSGGGGGGGGGGNYGQDQSSMSSGGGSGGGYGNQDQSGGGGSGGYGQQDRGGRGRGGSGGGGGGGGGGYNRSSGGYEPRGRGGGRGGRGGMGGSDRGGFNKFGGPRDQGSRHDSEQDNSDNNTIFVQGLGENVTIESVADYFKQIGIIKTNKKTGQPMINLYTDRETGKLKGEATVSFDDPPSAKAAIDWFDGKEFSGNPIKVSFATRRADFNRGGGNGRGGRGRGGPMGRGGYGGGGSGGGGRGGFPSGGGGGGGQQRAGDWKCPNPTCENMNFSWRNECNQCKAPKPDGPGGGPGGSHMGGNYGDDRRGGRGGAIANLVAQLENEVASLENENETLKKKNLHKKDLIAYLEKEIANLRKKIEEGKPIPNPLLGLDSTGAPGSAGSAAGSGACPVPLQLPPLERLTLDDKKPLNTLISATGLWMSRTGTIHKIKHHEVSRSKIYIEMACGDHLVVNNSRSSRTARALRHHKYRKTCKRCRVSDEDLNKFLTKANEDQTSVKVKVVSAPTRTKKAMPKSVARAPKPLENTEAAQAQPSGSKFSPAIPVSTQESVSVPASVSTSISSISTGATASALVKGNTNPITSMSAPVQASAPALTKSQTDRLEVLLNPKDEISLNSGKPFRELESELLSRRKKDLQQIYAEERENYLGKLEREITRFFVDRGFLEIKSPILIPLEYIERMGIDNDTELSKQIFRVDKNFCLRPMLAPNLMNYGRKLDRALPDPIKIFEIGPCYRKESDGKEHLEEFTMLNFTQMGSGCTRENLESIITDFLNHLGIDFKIVGDSCMVYGDTLDVMHGDLELSSAVVGPIPLDREWGIDKPWIGAGFGLERLLKVKHDFKNIKRAARSESYYNGISTNL

SEQ ID NO: 467 - DNA, 4188 bp, Artificial Sequence
  Description of Artificial Sequence: Synthetic polynucleotide
  KIF16B::FUS::CpkRS
atggcatcggtcaaggtggccgtgagggtccggcccatgaatcgcagggaaaaggacttggaggccaagttcattattcagatggagaaaagcaaaacgacaatcacaaacttaaagataccagaaggaggcactggggactcaggaagagaacggaccaagaccttcacctatgacttttctttttattctgctgatacaaaaagcccagattacgtttcacaagaaatggttttcaaaaccctcggcacagatgtcgtgaagtctgcatttgaaggttataatgcttgtgtctttgcatatgggcaaactggatctggaaagtcatacactatgatgggaaattctggagattctggcttaatacctcggatctgtgaaggactcttcagtcggataaatgaaaccaccagatgggatgaagcttcttttcgaactgaagtcagctacttagaaatttataacgaacgtgtgagagatctacttcggcggaagtcatctaaaaccttcaatttgagagtccgtgagcatcccaaagaaggcccttatgttgaggatttatccaaacatttagtacagaattatggtgacgtagaagaacttatggatgcgggcaatatcaaccggaccaccgcagcgactgggatgaacgacgtcagtagcaggtctcatgccatcttcaccatcaagttcactcaggctaaatttgattctgaaatgccatgtgaaaccgtcagtaagatccacttggttgatcttgccggaagtgagcgtgcagatgccaccggagccaccggggttaggctaaaggaagggggaaatattaacaagtccctcgtgactctggggaacgtcatttctgccttagctgatttatctcaggatgctgcaaatactcttgcaaagaagaagcaagttttcgtgccttacagggattctgtgttgacttggttgttaaaagatagccttggaggaaactctaaaactatcatgattgccaccatttcacctgctgatgtcaattatggagaaaccctaagtactcttcgctatgcaaatagagccaaaaacatcatcaacaagcctaccattaatgaggatgccaacgtcaaacttatccgtgagctgcgagctgaaatagccagactgaaaacgctgcttgctcaagggaatcagattgccctcttagactcccccacatatacagatattgaaatgaacagattgggaaagggcgcccccggctccgccggctccgccgccggctccggcatggcctcaaacgattatacccaacaagcaacccaaagctatggggcctaccccacccagcccgggcagggctattcccagcagagcagtcagccctacggacagcagagttacagtggttatagccagtccacggacacttcaggatatggccagagcagctattcttcttatggccagagccagaacacaggctatggaactcagtcaactccccagggatatggctcgactggcggctatggcagtagccagagctcccaatcgtcttacgggcagcagtcctcctaccctggctatggccagcagccagctcccagcagcacctcgggaagttacggtagcagttctcagagcagcagctatgggcagccccagagtgggagctacagccagcagcctagctatggtggacagcagcaaagctatggacagcagcaaagctataatccccctcagggctatggacagcagaaccagtacaacagcagcagtggtggtggaggtggaggtggaggtggaggtaactatggccaagatcaatcctccatgagtagtggtggtggcagtggtggcggttatggcaatcaagaccagagtggtggaggtggcagcggtggctatggacagcaggaccgtggaggccgcggcaggggtggcagtggtggcggcggcggcggcggcggtggtggttacaaccgcagcagtggtggctatgaacccagaggtcgtggaggtggccgtggaggcagaggtggcatgggcggaagtgaccgtggtggcttcaataaatttggtggccctcgggaccaaggatcacgtcatgactccgaacaggataattcagacaacaacaccatctttgtgcaaggcctgggtgagaatgttacaattgagtctgtggctgattacttcaagcagattggtattattaagacaaacaagaaaacgggacagcccatgattaatttgtacacagacagggaaactggcaagctgaagggagaggcaacggtctcttttgatgacccaccttcagctaaagcagctattgactggtttgatggtaaagaattctccggaaatcctatcaaggtctcatttgctactcgccgggcagactttaatcggggtggtggcaatggtcgtggaggccgagggcgaggaggacccatgggccgtggaggctatggaggtggtggcagtggtggtggtggccgaggaggatttcccagtggaggtggtggcggtggaggacagcagcgagctggtgactggaagtgtcctaatcccacctgtgagaatatgaacttctcttggaggaatgaatgcaaccagtgtaaggcccctaaaccagatggcccaggagggggaccaggtggctctcacatggggggtaactacggggatgatcgtcgtggtggcagaggaggcgattacaaggatgacgacgataagggtaccggcgcccccggctccgccggctccgccgccggctccggcgcgtgcccggtgccgctgcagctgccgccgctggaacgcctgaccctggatgataaaaaaccgctgaataccctgatctctgctactggtctgtggatgagtcgtaccggaaccattcataaaatcaaacaccacgaggttagccgttcgaaaatctatattgagatggcgtgtggcgatcatctggttgtgaacaatagccgctcttctcgtacagcacgtgcactgcgtcaccacaaatatcgtaaaacctgtaaacgttgccgtgtgtccgatgaggatctgaacaaattcctgacaaaagccaatgaggaccaaacaagcgtgaaagtgaaagtcgttagcgctcctacccgtactaaaaaagcaatgccgaaatccgttgctcgtgcccctaaaccactggaaaacactgaagcagcacaggcacagccgtctggaagcaaattctctccggccattcctgtttctacccaggagtccgtttctgttccagcaagtgtgagcaccagcattagcagtattagcaccggtgccaccgctagcgccctggttaaaggcaataccaatccgattacaagcatgtctgccccggttcaagcatcagctccagcactgacaaaatcccaaaccgatcgtctggaggttctgctgaatccgaaagacgaaatcagcctgaattccggcaaaccgtttcgtgaactggagagcgaactgctgtcacgtcgtaaaaaagacctgcaacaaatctatgccgaagaacgtgagaactatctggggaaactggaacgtgaaatcacccgctttttcgtggatcgtggctttctggagatcaaatccccgattctgattcctctggagtatatcgagcgtatgggcatcgacaatgataccgaactgagcaaacaaattttccgtgtggataaaaacttctgtctgcgccctatgctttcaccaaatctgtataactatctgcgcaaactggaccgtgccctgcctgatcctatcaaaatcttcgagatcggcccgtgttatcgtaaagagtccgacggtaaagaacatctggaggagtttaccatgctgaacttttgccaaatgggttcaggttgtactcgtgagaacctggaaagcatcatcaccgattttctgaaccacctgggcattgacttcaaaattgtgggcgacagctgtatggtgtatggcgacaccctggatgtcatgcacggcgacctggaactgtctagtgccgttgttggaccaattccgctggaccgtgagtggggtatcgacaaaccgtggatcggagcaggattcggtctggaacgcctgctgaaagtgaaacacgacttcaaaaacatcaaacgtgccgcccgttctgaatcgtattataacgggatctctacgaacctgtaa

SEQ ID NO: 468 - protein, 1395 aa, Artificial Sequence
  Description of Artificial Sequence: Synthetic polypeptide
  KIF16B::FUS::CpkRS
MASVKVAVRVRPMNRREKDLEAKFIIQMEKSKTTITNLKIPEGGTGDSGRERTKTFTYDFSFYSADTKSPDYVSQEMVFKTLGTDVVKSAFEGYNACVFAYGQTGSGKSYTMMGNSGDSGLIPRICEGLFSRINETTRWDEASFRTEVSYLEIYNERVRDLLRRKSSKTFNLRVREHPKEGPYVEDLSKHLVQNYGDVEELMDAGNINRTTAATGMNDVSSRSHAIFTIKFTQAKFDSEMPCETVSKIHLVDLAGSERADATGATGVRLKEGGNINKSLVTLGNVISALADLSQDAANTLAKKKQVFVPYRDSVLTWLLKDSLGGNSKTIMIATISPADVNYGETLSTLRYANRAKNIINKPTINEDANVKLIRELRAEIARLKTLLAQGNQIALLDSPTYTDIEMNRLGKGAPGSAGSAAGSGMASNDYTQQATQSYGAYPTQPGQGYSQQSSQPYGQQSYSGYSQSTDTSGYGQSSYSSYGQSQNTGYGTQSTPQGYGSTGGYGSSQSSQSSYGQQSSYPGYGQQPAPSSTSGSYGSSSQSSSYGQPQSGSYSQQPSYGGQQQSYGQQQSYNPPQGYGQQNQYNSSSGGGGGGGGGGNYGQDQSSMSSGGGSGGGYGNQDQSGGGGSGGYGQQDRGGRGRGGSGGGGGGGGGGYNRSSGGYEPRGRGGGRGGRGGMGGSDRGGFNKFGGPRDQGSRHDSEQDNSDNNTIFVQGLGENVTIESVADYFKQIGIIKTNKKTGQPMINLYTDRETGKLKGEATVSFDDPPSAKAAIDWFDGKEFSGNPIKVSFATRRADFNRGGGNGRGGRGRGGPMGRGGYGGGGSGGGGRGGFPSGGGGGGGQQRAGDWKCPNPTCENMNFSWRNECNQCKAPKPDGPGGGPGGSHMGGNYGDDRRGGRGGDYKDDDDKGTGAPGSAGSAAGSGACPVPLQLPPLERLTLDDKKPLNTLISATGLWMSRTGTIHKIKHHEVSRSKIYIEMACGDHLVVNNSRSSRTARALRHHKYRKTCKRCRVSDEDLNKFLTKANEDQTSVKVKVVSAPTRTKKAMPKSVARAPKPLENTEAAQAQPSGSKFSPAIPVSTQESVSVPASVSTSISSISTGATASALVKGNTNPITSMSAPVQASAPALTKSQTDRLEVLLNPKDEISLNSGKPFRELESELLSRRKKDLQQIYAEERENYLGKLEREITRFFVDRGFLEIKSPILIPLEYIERMGIDNDTELSKQIFRVDKNFCLRPMLSPNLYNYLRKLDRALPDPIKIFEIGPCYRKESDGKEHLEEFTMLNFCQMGSGCTRENLESIITDFLNHLGIDFKIVGDSCMVYGDTLDVMHGDLELSSAVVGPIPLDREWGIDKPWIGAGFGLERLLKVKHDFKNIKRAARSESYYNGISTNL

SEQ ID NO: 469 - DNA, 2928 bp, Artificial Sequence
  Description of Artificial Sequence: Synthetic polynucleotide
  LCK::FUS::CpkRS
atgggctgcgtgtgcagcagcaaccccgagggtaccgagctcgcctcaaacgattatacccaacaagcaacccaaagctatggggcctaccccacccagcccgggcagggctattcccagcagagcagtcagccctacggacagcagagttacagtggttatagccagtccacggacacttcaggatatggccagagcagctattcttcttatggccagagccagaacacaggctatggaactcagtcaactccccagggatatggctcgactggcggctatggcagtagccagagctcccaatcgtcttacgggcagcagtcctcctaccctggctatggccagcagccagctcccagcagcacctcgggaagttacggtagcagttctcagagcagcagctatgggcagccccagagtgggagctacagccagcagcctagctatggtggacagcagcaaagctatggacagcagcaaagctataatccccctcagggctatggacagcagaaccagtacaacagcagcagtggtggtggaggtggaggtggaggtggaggtaactatggccaagatcaatcctccatgagtagtggtggtggcagtggtggcggttatggcaatcaagaccagagtggtggaggtggcagcggtggctatggacagcaggaccgtggaggccgcggcaggggtggcagtggtggcggcggcggcggcggcggtggtggttacaaccgcagcagtggtggctatgaacccagaggtcgtggaggtggccgtggaggcagaggtggcatgggcggaagtgaccgtggtggcttcaataaatttggtggccctcgggaccaaggatcacgtcatgactccgaacaggataattcagacaacaacaccatctttgtgcaaggcctgggtgagaatgttacaattgagtctgtggctgattacttcaagcagattggtattattaagacaaacaagaaaacgggacagcccatgattaatttgtacacagacagggaaactggcaagctgaagggagaggcaacggtctcttttgatgacccaccttcagctaaagcagctattgactggtttgatggtaaagaattctccggaaatcctatcaaggtctcatttgctactcgccgggcagactttaatcggggtggtggcaatggtcgtggaggccgagggcgaggaggacccatgggccgtggaggctatggaggtggtggcagtggtggtggtggccgaggaggatttcccagtggaggtggtggcggtggaggacagcagcgagctggtgactggaagtgtcctaatcccacctgtgagaatatgaacttctcttggaggaatgaatgcaaccagtgtaaggcccctaaaccagatggcccaggagggggaccaggtggctctcacatggggggtaactacggggatgatcgtcgtggtggcagaggaggcggcgcccccggctccgccggctccgccgccggctccggcatggcgtgcccggtgccgctgcagctgccgccgctggaacgcctgaccctggatgataaaaaaccgctgaataccctgatctctgctactggtctgtggatgagtcgtaccggaaccattcataaaatcaaacaccacgaggttagccgttcgaaaatctatattgagatggcgtgtggcgatcatctggttgtgaacaatagccgctcttctcgtacagcacgtgcactgcgtcaccacaaatatcgtaaaacctgtaaacgttgccgtgtgtccgatgaggatctgaacaaattcctgacaaaagccaatgaggaccaaacaagcgtgaaagtgaaagtcgttagcgctcctacccgtactaaaaaagcaatgccgaaatccgttgctcgtgcccctaaaccactggaaaacactgaagcagcacaggcacagccgtctggaagcaaattctctccggccattcctgtttctacccaggagtccgtttctgttccagcaagtgtgagcaccagcattagcagtattagcaccggtgccaccgctagcgccctggttaaaggcaataccaatccgattacaagcatgtctgccccggttcaagcatcagctccagcactgacaaaatcccaaaccgatcgtctggaggttctgctgaatccgaaagacgaaatcagcctgaattccggcaaaccgtttcgtgaactggagagcgaactgctgtcacgtcgtaaaaaagacctgcaacaaatctatgccgaagaacgtgagaactatctggggaaactggaacgtgaaatcacccgctttttcgtggatcgtggctttctggagatcaaatccccgattctgattcctctggagtatatcgagcgtatgggcatcgacaatgataccgaactgagcaaacaaattttccgtgtggataaaaacttctgtctgcgccctatgctttcaccaaatctgtataactatctgcgcaaactggaccgtgccctgcctgatcctatcaaaatcttcgagatcggcccgtgttatcgtaaagagtccgacggtaaagaacatctggaggagtttaccatgctgaacttttgccaaatgggttcaggttgtactcgtgagaacctggaaagcatcatcaccgattttctgaaccacctgggcattgacttcaaaattgtgggcgacagctgtatggtgtatggcgacaccctggatgtcatgcacggcgacctggaactgtctagtgccgttgttggaccaattccgctggaccgtgagtggggtatcgacaaaccgtggatcggagcaggattcggtctggaacgcctgctgaaagtgaaacacgacttcaaaaacatcaaacgtgccgcccgttctgaatcgtattataacgggatctctacgaacctgtaa

SEQ ID NO: 470 - protein, 975 aa, Artificial Sequence
  Description of Artificial Sequence: Synthetic polypeptide
  LCK::FUS::CpkRS
MGCVCSSNPEGTELASNDYTQQATQSYGAYPTQPGQGYSQQSSQPYGQQSYSGYSQSTDTSGYGQSSYSSYGQSQNTGYGTQSTPQGYGSTGGYGSSQSSQSSYGQQSSYPGYGQQPAPSSTSGSYGSSSQSSSYGQPQSGSYSQQPSYGGQQQSYGQQQSYNPPQGYGQQNQYNSSSGGGGGGGGGGNYGQDQSSMSSGGGSGGGYGNQDQSGGGGSGGYGQQDRGGRGRGGSGGGGGGGGGGYNRSSGGYEPRGRGGGRGGRGGMGGSDRGGFNKFGGPRDQGSRHDSEQDNSDNNTIFVQGLGENVTIESVADYFKQIGIIKTNKKTGQPMINLYTDRETGKLKGEATVSFDDPPSAKAAIDWFDGKEFSGNPIKVSFATRRADFNRGGGNGRGGRGRGGPMGRGGYGGGGSGGGGRGGFPSGGGGGGGQQRAGDWKCPNPTCENMNFSWRNECNQCKAPKPDGPGGGPGGSHMGGNYGDDRRGGRGGGAPGSAGSAAGSGMACPVPLQLPPLERLTLDDKKPLNTLISATGLWMSRTGTIHKIKHHEVSRSKIYIEMACGDHLVVNNSRSSRTARALRHHKYRKTCKRCRVSDEDLNKFLTKANEDQTSVKVKVVSAPTRTKKAMPKSVARAPKPLENTEAAQAQPSGSKFSPAIPVSTQESVSVPASVSTSISSISTGATASALVKGNTNPITSMSAPVQASAPALTKSQTDRLEVLLNPKDEISLNSGKPFRELESELLSRRKKDLQQIYAEERENYLGKLEREITRFFVDRGFLEIKSPILIPLEYIERMGIDNDTELSKQIFRVDKNFCLRPMLSPNLYNYLRKLDRALPDPIKIFEIGPCYRKESDGKEHLEEFTMLNFCQMGSGCTRENLESIITDFLNHLGIDFKIVGDSCMVYGDTLDVMHGDLELSSAVVGPIPLDREWGIDKPWIGAGFGLERLLKVKHDFKNIKRAARSESYYNGISTNL

SEQ ID NO: 471 - DNA, 1455 bp, Artificial Sequence
  Description of Artificial Sequence: Synthetic polynucleotide
  LCK::CpkRS
atgggctgcgtgtgcagcagcaaccccgagggtaccgagctcgcgtgcccggtgccgctgcagctgccgccgctggaacgcctgaccctggatgataaaaaaccgctgaataccctgatctctgctactggtctgtggatgagtcgtaccggaaccattcataaaatcaaacaccacgaggttagccgttcgaaaatctatattgagatggcgtgtggcgatcatctggttgtgaacaatagccgctcttctcgtacagcacgtgcactgcgtcaccacaaatatcgtaaaacctgtaaacgttgccgtgtgtccgatgaggatctgaacaaattcctgacaaaagccaatgaggaccaaacaagcgtgaaagtgaaagtcgttagcgctcctacccgtactaaaaaagcaatgccgaaatccgttgctcgtgcccctaaaccactggaaaacactgaagcagcacaggcacagccgtctggaagcaaattctctccggccattcctgtttctacccaggagtccgtttctgttccagcaagtgtgagcaccagcattagcagtattagcaccggtgccaccgctagcgccctggttaaaggcaataccaatccgattacaagcatgtctgccccggttcaagcatcagctccagcactgacaaaatcccaaaccgatcgtctggaggttctgctgaatccgaaagacgaaatcagcctgaattccggcaaaccgtttcgtgaactggagagcgaactgctgtcacgtcgtaaaaaagacctgcaacaaatctatgccgaagaacgtgagaactatctggggaaactggaacgtgaaatcacccgctttttcgtggatcgtggctttctggagatcaaatccccgattctgattcctctggagtatatcgagcgtatgggcatcgacaatgataccgaactgagcaaacaaattttccgtgtggataaaaacttctgtctgcgccctatgctttcaccaaatctgtataactatctgcgcaaactggaccgtgccctgcctgatcctatcaaaatcttcgagatcggcccgtgttatcgtaaagagtccgacggtaaagaacatctggaggagtttaccatgctgaacttttgccaaatgggttcaggttgtactcgtgagaacctggaaagcatcatcaccgattttctgaaccacctgggcattgacttcaaaattgtgggcgacagctgtatggtgtatggcgacaccctggatgtcatgcacggcgacctggaactgtctagtgccgttgttggaccaattccgctggaccgtgagtggggtatcgacaaaccgtggatcggagcaggattcggtctggaacgcctgctgaaagtgaaacacgacttcaaaaacatcaaacgtgccgcccgttctgaatcgtattataacgggatctctacgaacctgtaa

SEQ ID NO: 472 - protein, 484 aa, Artificial Sequence
  Description of Artificial Sequence: Synthetic polypeptide
  LCK::CpkRS
MGCVCSSNPEGTELACPVPLQLPPLERLTLDDKKPLNTLISATGLWMSRTGTIHKIKHHEVSRSKIYIEMACGDHLVVNNSRSSRTARALRHHKYRKTCKRCRVSDEDLNKFLTKANEDQTSVKVKVVSAPTRTKKAMPKSVARAPKPLENTEAAQAQPSGSKFSPAIPVSTQESVSVPASVSTSISSISTGATASALVKGNTNPITSMSAPVQASAPALTKSQTDRLEVLLNPKDEISLNSGKPFRELESELLSRRKKDLQQIYAEERENYLGKLEREITRFFVDRGFLEIKSPILIPLEYIERMGIDNDTELSKQIFRVDKNFCLRPMLSPNLYNYLRKLDRALPDPIKIFEIGPCYRKESDGKEHLEEFTMLNFCQMGSGCTRENLESIITDFLNHLGIDFKIVGDSCMVYGDTLDVMHGDLELSSAVVGPIPLDREWGIDKPWIGAGFGLERLLKVKHDFKNIKRAARSESYYNGISTNL

SEQ ID NO: 473 - DNA, 3273 bp, Artificial Sequence
  Description of Artificial Sequence: Synthetic polynucleotide
  TOM20::FUS::SYNZIP3::CbzRS
atggtgggtcggaacagcgccatcgccgccggtgtatgcggggcccttttcattgggtactgcatctacttcgaccgcaaaagacgaagtgaccccaacttcaagaacaggcttcgagaacgaagaaagaaacagaagcttgccaaggagagagctgggctttccaagttacctgaccttaaagatgctgaagctgttcagaaattcttcatggcctcaaacgattatacccaacaagcaacccaaagctatggggcctaccccacccagcccgggcagggctattcccagcagagcagtcagccctacggacagcagagttacagtggttatagccagtccacggacacttcaggatatggccagagcagctattcttcttatggccagagccagaacacaggctatggaactcagtcaactccccagggatatggctcgactggcggctatggcagtagccagagctcccaatcgtcttacgggcagcagtcctcctaccctggctatggccagcagccagctcccagcagcacctcgggaagttacggtagcagttctcagagcagcagctatgggcagccccagagtgggagctacagccagcagcctagctatggtggacagcagcaaagctatggacagcagcaaagctataatccccctcagggctatggacagcagaaccagtacaacagcagcagtggtggtggaggtggaggtggaggtggaggtaactatggccaagatcaatcctccatgagtagtggtggtggcagtggtggcggttatggcaatcaagaccagagtggtggaggtggcagcggtggctatggacagcaggaccgtggaggccgcggcaggggtggcagtggtggcggcggcggcggcggcggtggtggttacaaccgcagcagtggtggctatgaacccagaggtcgtggaggtggccgtggaggcagaggtggcatgggcggaagtgaccgtggtggcttcaataaatttggtggccctcgggaccaaggatcacgtcatgactccgaacaggataattcagacaacaacaccatctttgtgcaaggcctgggtgagaatgttacaattgagtctgtggctgattacttcaagcagattggtattattaagacaaacaagaaaacgggacagcccatgattaatttgtacacagacagggaaactggcaagctgaagggagaggcaacggtctcttttgatgacccaccttcagctaaagcagctattgactggtttgatggtaaagaattctccggaaatcctatcaaggtctcatttgctactcgccgggcagactttaatcggggtggtggcaatggtcgtggaggccgagggcgaggaggacccatgggccgtggaggctatggaggtggtggcagtggtggtggtggccgaggaggatttcccagtggaggtggtggcggtggaggacagcagcgagctggtgactggaagtgtcctaatcccacctgtgagaatatgaacttctcttggaggaatgaatgcaaccagtgtaaggcccctaaaccagatggcccaggagggggaccaggtggctctcacatggggggtaactacggggatgatcgtcgtggtggcagaggaggcgcgatcgcaaatgaggtgaccaccctggaaaacgacgccgccttcatcgagaacgagaacgcctacctggaaaaagagatcgccagactgagaaaggaaaaggccgctctgcggaacagactggcccacaagaagggcaagcctattcccaaccccctgctgggcctggatagcaccggagcaccaggaagtgctggttctgctgctggtagtggagcgtgcccggtgccgctgcagctgccgccgctggaacgcctgaccctggatgataaaaaaccgctgaataccctgatctctgctactggtctgtggatgagtcgtaccggaaccattcataaaatcaaacaccacgaggttagccgttcgaaaatctatattgagatggcgtgtggcgatcatctggttgtgaacaatagccgctcttctcgtacagcacgtgcactgcgtcaccacaaatatcgtaaaacctgtaaacgttgccgtgtgtccgatgaggatctgaacaaattcctgacaaaagccaatgaggaccaaacaagcgtgaaagtgaaagtcgttagcgctcctacccgtactaaaaaagcaatgccgaaatccgttgctcgtgcccctaaaccactggaaaacactgaagcagcacaggcacagccgtctggaagcaaattctctccggccattcctgtttctacccaggagtccgtttctgttccagcaagtgtgagcaccagcattagcagtattagcaccggtgccaccgctagcgccctggttaaaggcaataccaatccgattacaagcatgtctgccccggttcaagcatcagctccagcactgacaaaatcccaaaccgatcgtctggaggttctgctgaatccgaaagacgaaatcagcctgaattccggcaaaccgtttcgtgaactggagagcgaactgctgtcacgtcgtaaaaaagacctgcaacaaatctatgccgaagaacgtgagaactatctggggaaactggaacgtgaaatcacccgctttttcgtggatcgtggctttctggagatcaaatccccgattctgattcctctggagtatatcgagcgtatgggcatcgacaatgataccgaactgagcaaacaaattttccgtgtggataaaaacttctgtctgcgccctatgcttgcaccaaatctgatgaactatggacgcaaactggaccgtgccctgcctgatcctatcaaaatcttcgagatcggcccgtgttatcgtaaagagtccgacggtaaagaacatctggaggagtttaccatgctgaactttacacaaatgggttcaggttgtactcgtgagaacctggaaagcatcatcaccgattttctgaaccacctgggcattgacttcaaaattgtgggcgacagctgtatggtgtatggcgacaccctggatgtcatgcacggcgacctggaactgtctagtgccgttgttggaccaattccgctggaccgtgagtggggtatcgacaaaccgtggatcggagcaggattcggtctggaacgcctgctgaaagtgaaacacgacttcaaaaacatcaaacgtgccgcccgttctgaatcgtattataacgggatctctacgaacctgtaa

SEQ ID NO: 474 - protein, 1090 aa, Artificial Sequence
  Description of Artificial Sequence: Synthetic polypeptide
  TOM20::FUS::SYNZIP3::CbzRS
MVGRNSAIAAGVCGALFIGYCIYFDRKRRSDPNFKNRLRERRKKQKLAKERAGLSKLPDLKDAEAVQKFFMASNDYTQQATQSYGAYPTQPGQGYSQQSSQPYGQQSYSGYSQSTDTSGYGQSSYSSYGQSQNTGYGTQSTPQGYGSTGGYGSSQSSQSSYGQQSSYPGYGQQPAPSSTSGSYGSSSQSSSYGQPQSGSYSQQPSYGGQQQSYGQQQSYNPPQGYGQQNQYNSSSGGGGGGGGGGNYGQDQSSMSSGGGSGGGYGNQDQSGGGGSGGYGQQDRGGRGRGGSGGGGGGGGGGYNRSSGGYEPRGRGGGRGGRGGMGGSDRGGFNKFGGPRDQGSRHDSEQDNSDNNTIFVQGLGENVTIESVADYFKQIGIIKTNKKTGQPMINLYTDRETGKLKGEATVSFDDPPSAKAAIDWFDGKEFSGNPIKVSFATRRADFNRGGGNGRGGRGRGGPMGRGGYGGGGSGGGGRGGFPSGGGGGGGQQRAGDWKCPNPTCENMNFSWRNECNQCKAPKPDGPGGGPGGSHMGGNYGDDRRGGRGGAIANEVTTLENDAAFIENENAYLEKEIARLRKEKAALRNRLAHKKGKPIPNPLLGLDSTGAPGSAGSAAGSGACPVPLQLPPLERLTLDDKKPLNTLISATGLWMSRTGTIHKIKHHEVSRSKIYIEMACGDHLVVNNSRSSRTARALRHHKYRKTCKRCRVSDEDLNKFLTKANEDQTSVKVKVVSAPTRTKKAMPKSVARAPKPLENTEAAQAQPSGSKFSPAIPVSTQESVSVPASVSTSISSISTGATASALVKGNTNPITSMSAPVQASAPALTKSQTDRLEVLLNPKDEISLNSGKPFRELESELLSRRKKDLQQIYAEERENYLGKLEREITRFFVDRGFLEIKSPILIPLEYIERMGIDNDTELSKQIFRVDKNFCLRPMLAPNLMNYGRKLDRALPDPIKIFEIGPCYRKESDGKEHLEEFTMLNFTQMGSGCTRENLESIITDFLNHLGIDFKIVGDSCMVYGDTLDVMHGDLELSSAVVGPIPLDREWGIDKPWIGAGFGLERLLKVKHDFKNIKRAARSESYYNGISTNL

SEQ ID NO: 475 - DNA, 3273 bp, Artificial Sequence
  Description of Artificial Sequence: Synthetic polynucleotide
  TOM20::FUS::SYNZIP3::CpkRS
atggtgggtcggaacagcgccatcgccgccggtgtatgcggggcccttttcattgggtactgcatctacttcgaccgcaaaagacgaagtgaccccaacttcaagaacaggcttcgagaacgaagaaagaaacagaagcttgccaaggagagagctgggctttccaagttacctgaccttaaagatgctgaagctgttcagaaattcttcatggcctcaaacgattatacccaacaagcaacccaaagctatggggcctaccccacccagcccgggcagggctattcccagcagagcagtcagccctacggacagcagagttacagtggttatagccagtccacggacacttcaggatatggccagagcagctattcttcttatggccagagccagaacacaggctatggaactcagtcaactccccagggatatggctcgactggcggctatggcagtagccagagctcccaatcgtcttacgggcagcagtcctcctaccctggctatggccagcagccagctcccagcagcacctcgggaagttacggtagcagttctcagagcagcagctatgggcagccccagagtgggagctacagccagcagcctagctatggtggacagcagcaaagctatggacagcagcaaagctataatccccctcagggctatggacagcagaaccagtacaacagcagcagtggtggtggaggtggaggtggaggtggaggtaactatggccaagatcaatcctccatgagtagtggtggtggcagtggtggcggttatggcaatcaagaccagagtggtggaggtggcagcggtggctatggacagcaggaccgtggaggccgcggcaggggtggcagtggtggcggcggcggcggcggcggtggtggttacaaccgcagcagtggtggctatgaacccagaggtcgtggaggtggccgtggaggcagaggtggcatgggcggaagtgaccgtggtggcttcaataaatttggtggccctcgggaccaaggatcacgtcatgactccgaacaggataattcagacaacaacaccatctttgtgcaaggcctgggtgagaatgttacaattgagtctgtggctgattacttcaagcagattggtattattaagacaaacaagaaaacgggacagcccatgattaatttgtacacagacagggaaactggcaagctgaagggagaggcaacggtctcttttgatgacccaccttcagctaaagcagctattgactggtttgatggtaaagaattctccggaaatcctatcaaggtctcatttgctactcgccgggcagactttaatcggggtggtggcaatggtcgtggaggccgagggcgaggaggacccatgggccgtggaggctatggaggtggtggcagtggtggtggtggccgaggaggatttcccagtggaggtggtggcggtggaggacagcagcgagctggtgactggaagtgtcctaatcccacctgtgagaatatgaacttctcttggaggaatgaatgcaaccagtgtaaggcccctaaaccagatggcccaggagggggaccaggtggctctcacatggggggtaactacggggatgatcgtcgtggtggcagaggaggcgcgatcgcaaatgaggtgaccaccctggaaaacgacgccgccttcatcgagaacgagaacgcctacctggaaaaagagatcgccagactgagaaaggaaaaggccgctctgcggaacagactggcccacaagaagggcaagcctattcccaaccccctgctgggcctggatagcaccggagcaccaggaagtgctggttctgctgctggtagtggagcgtgcccggtgccgctgcagctgccgccgctggaacgcctgaccctggatgataaaaaaccgctgaataccctgatctctgctactggtctgtggatgagtcgtaccggaaccattcataaaatcaaacaccacgaggttagccgttcgaaaatctatattgagatggcgtgtggcgatcatctggttgtgaacaatagccgctcttctcgtacagcacgtgcactgcgtcaccacaaatatcgtaaaacctgtaaacgttgccgtgtgtccgatgaggatctgaacaaattcctgacaaaagccaatgaggaccaaacaagcgtgaaagtgaaagtcgttagcgctcctacccgtactaaaaaagcaatgccgaaatccgttgctcgtgcccctaaaccactggaaaacactgaagcagcacaggcacagccgtctggaagcaaattctctccggccattcctgtttctacccaggagtccgtttctgttccagcaagtgtgagcaccagcattagcagtattagcaccggtgccaccgctagcgccctggttaaaggcaataccaatccgattacaagcatgtctgccccggttcaagcatcagctccagcactgacaaaatcccaaaccgatcgtctggaggttctgctgaatccgaaagacgaaatcagcctgaattccggcaaaccgtttcgtgaactggagagcgaactgctgtcacgtcgtaaaaaagacctgcaacaaatctatgccgaagaacgtgagaactatctggggaaactggaacgtgaaatcacccgctttttcgtggatcgtggctttctggagatcaaatccccgattctgattcctctggagtatatcgagcgtatgggcatcgacaatgataccgaactgagcaaacaaattttccgtgtggataaaaacttctgtctgcgccctatgctttcaccaaatctgtataactatctgcgcaaactggaccgtgccctgcctgatcctatcaaaatcttcgagatcggcccgtgttatcgtaaagagtccgacggtaaagaacatctggaggagtttaccatgctgaacttttgccaaatgggttcaggttgtactcgtgagaacctggaaagcatcatcaccgattttctgaaccacctgggcattgacttcaaaattgtgggcgacagctgtatggtgtatggcgacaccctggatgtcatgcacggcgacctggaactgtctagtgccgttgttggaccaattccgctggaccgtgagtggggtatcgacaaaccgtggatcggagcaggattcggtctggaacgcctgctgaaagtgaaacacgacttcaaaaacatcaaacgtgccgcccgttctgaatcgtattataacgggatctctacgaacctgtaa

SEQ ID NO: 476 - protein, 1090 aa, Artificial Sequence
  Description of Artificial Sequence: Synthetic polypeptide
  TOM20::FUS::SYNZIP3::CpkRS
MVGRNSAIAAGVCGALFIGYCIYFDRKRRSDPNFKNRLRERRKKQKLAKERAGLSKLPDLKDAEAVQKFFMASNDYTQQATQSYGAYPTQPGQGYSQQSSQPYGQQSYSGYSQSTDTSGYGQSSYSSYGQSQNTGYGTQSTPQGYGSTGGYGSSQSSQSSYGQQSSYPGYGQQPAPSSTSGSYGSSSQSSSYGQPQSGSYSQQPSYGGQQQSYGQQQSYNPPQGYGQQNQYNSSSGGGGGGGGGGNYGQDQSSMSSGGGSGGGYGNQDQSGGGGSGGYGQQDRGGRGRGGSGGGGGGGGGGYNRSSGGYEPRGRGGGRGGRGGMGGSDRGGFNKFGGPRDQGSRHDSEQDNSDNNTIFVQGLGENVTIESVADYFKQIGIIKTNKKTGQPMINLYTDRETGKLKGEATVSFDDPPSAKAAIDWFDGKEFSGNPIKVSFATRRADFNRGGGNGRGGRGRGGPMGRGGYGGGGSGGGGRGGFPSGGGGGGGQQRAGDWKCPNPTCENMNFSWRNECNQCKAPKPDGPGGGPGGSHMGGNYGDDRRGGRGGAIANEVTTLENDAAFIENENAYLEKEIARLRKEKAALRNRLAHKKGKPIPNPLLGLDSTGAPGSAGSAAGSGACPVPLQLPPLERLTLDDKKPLNTLISATGLWMSRTGTIHKIKHHEVSRSKIYIEMACGDHLVVNNSRSSRTARALRHHKYRKTCKRCRVSDEDLNKFLTKANEDQTSVKVKVVSAPTRTKKAMPKSVARAPKPLENTEAAQAQPSGSKFSPAIPVSTQESVSVPASVSTSISSISTGATASALVKGNTNPITSMSAPVQASAPALTKSQTDRLEVLLNPKDEISLNSGKPFRELESELLSRRKKDLQQIYAEERENYLGKLEREITRFFVDRGFLEIKSPILIPLEYIERMGIDNDTELSKQIFRVDKNFCLRPMLSPNLYNYLRKLDRALPDPIKIFEIGPCYRKESDGKEHLEEFTMLNFCQMGSGCTRENLESIITDFLNHLGIDFKIVGDSCMVYGDTLDVMHGDLELSSAVVGPIPLDREWGIDKPWIGAGFGLERLLKVKHDFKNIKRAARSESYYNGISTNL

SEQ ID NO: 477 - DNA, 6765 bp, Artificial Sequence
  Description of Artificial Sequence: Synthetic polynucleotide
  TOM20::EWSR1::PylRS(AA)::FUS::PylRS(AA)
atggtgggtcggaacagcgccatcgccgccggtgtatgcggggcccttttcattgggtactgcatctacttcgaccgcaaaagacgaagtgaccccaacttcaagaacaggcttcgagaacgaagaaagaaacagaagcttgccaaggagagagctgggctttccaagttacctgaccttaaagatgctgaagctgttcagaagttcttcatggcgtccacggattacagtacctatagccaagctgcagcgcagcagggctacagtgcttacaccgcccagcccactcaaggatatgcacagaccacccaggcatatgggcaacaaagctatggaacctatggacagcccactgatgtcagctatacccaggctcagaccactgcaacctatgggcagaccgcctatgcaacttcttatggacagcctcccactggttatactactccaactgccccccaggcatacagccagcctgtccaggggtatggcactggtgcttatgataccaccactgctacagtcaccaccacccaggcctcctatgcagctcagtctgcatatggcactcagcctgcttatccagcctatgggcagcagccagcagccactgcacctacaagaccgcaggatggaaacaagcccactgagactagtcaacctcaatctagcacagggggttacaaccagcccagcctaggatatggacagagtaactacagttatccccaggtacctgggagctaccccatgcagccagtcactgcacctccatcctaccctcctaccagctattcctctacacagccgactagttatgatcagagcagttactctcagcagaacacctatgggcaaccgagcagctatggacagcagagtagctatggtcaacaaagcagctatgggcagcagcctcccactagttacccaccccaaactggatcctacagccaagctccaagtcaatatagccaacagagcagcagctacgggcagcagagttcattccgacaggaccaccccagtagcatgggtgtttatgggcaggagtctggaggattttccggaccaggagagaaccggagcatgagtggccctgataaccggggcaggggaagagggggatttgatcgtggaggcatgagcagaggtgggcggggaggaggacgcggtggaatgggcagcgctggagagcgaggtggcttcaataagcctggtggacccatggatgaaggaccagatcttgatctaggcccacctgtagatccagatgaagactctgacaacagtgcaatttatgtacaaggattaaatgacagtgtgactctagatgatctggcagacttctttaagcagtgtggggttgttaagatgaacaagagaactgggcaacccatgatccacatctacctggacaaggaaacaggaaagcccaaaggcgatgccacagtgtcctatgaagacccacctactgccaaggctgccgtggaatggtttgatgggaaagattttcaagggagcaaacttaaagtctcccttgctcggaagaagcctccaatgaacagtatgcggggtggtctgccaccccgtgagggcagaggcatgccaccaccactccgtggaggtccaggaggcccaggaggtcctgggggacccatgggtcgcatgggaggccgtggaggagatagaggaggcttccctccaagaggaccccggggttcccgagggaacccctctggaggaggaaacgtccagcaccgagctggagactggcagtgtcccaatccgggttgtggaaaccagaacttcgcctggagaacagagtgcaaccagtgtaaggccccaaagcctgaaggcttcctcccgccaccctttccgcccccgggtggtgatcgtggcagaggtggccctggtggcatgcggggaggaagaggtggcctcatggatcgtggtggtcccggtggaatgttcagaggtggccgtggtggagacagaggtggcttccgtggtggccggggcatggaccgaggtggctttggtggaggaagacgaggtggccctggggggccccctggacctttgatggaacaggcgatcgcatatccctatgatgtgccggattatgctggagcaccaggaagtgctggttctgctgctggtagtggagcttctaactttactcagttcgttctcgtcgacaatggcggaactggcgacgtgactgtcgccccaagcaacttcgctaacgggatcgctgaatggatcagctctaactcgcgttcacaggcttacaaagtaacctgtagcgttcgtcagagctctgcgcagaatcgcaaatacaccatcaaagtcgaggtgcctaaaggcgcctggcgttcgtacttaaatatggaactaaccattccaattttcgccacgaattccgactgcgagcttattgttaaggcaatgcaaggtctcctaaaagatggaaacccgattccctcagcaatcgcagcaaactccggcatctacgggctaagccccgaccgcgttagagccgtatcccactggtcttccgcgtgcccggtgccgctgcagctgccgccgctggaacgcctgaccctggatgataaaaaaccgctgaataccctgatctctgctactggtctgtggatgagtcgtaccggaaccattcataaaatcaaacaccacgaggttagccgttcgaaaatctatattgagatggcgtgtggcgatcatctggttgtgaacaatagccgctcttctcgtacagcacgtgcactgcgtcaccacaaatatcgtaaaacctgtaaacgttgccgtgtgtccgatgaggatctgaacaaattcctgacaaaagccaatgaggaccaaacaagcgtgaaagtgaaagtcgttagcgctcctacccgtactaaaaaagcaatgccgaaatccgttgctcgtgcccctaaaccactggaaaacactgaagcagcacaggcacagccgtctggaagcaaattctctccggccattcctgtttctacccaggagtccgtttctgttccagcaagtgtgagcaccagcattagcagtattagcaccggtgccaccgctagcgccctggttaaaggcaataccaatccgattacaagcatgtctgccccggttcaagcatcagctccagcactgacaaaatcccaaaccgatcgtctggaggttctgctgaatccgaaagacgaaatcagcctgaattccggcaaaccgtttcgtgaactggagagcgaactgctgtcacgtcgtaaaaaagacctgcaacaaatctatgccgaagaacgtgagaactatctggggaaactggaacgtgaaatcacccgctttttcgtggatcgtggctttctggagatcaaatccccgattctgattcctctggagtatatcgagcgtatgggcatcgacaatgataccgaactgagcaaacaaattttccgtgtggataaaaacttctgtctgcgccctatgctggcaccaaatctgtataactatctgcgcaaactggaccgtgccctgcctgatcctatcaaaatcttcgagatcggcccgtgttatcgtaaagagtccgacggtaaagaacatctggaggagtttaccatgctggcctttgcccaaatgggttcaggttgtactcgtgagaacctggaaagcatcatcaccgattttctgaaccacctgggcattgacttcaaaattgtgggcgacagctgtatggtgtatggcgacaccctggatgtcatgcacggcgacctggaactgtctagtgccgttgttggaccaattccgctggaccgtgagtggggtatcgacaaaccgtggatcggagcaggattcggtctggaacgcctgctgaaagtgaaacacgacttcaaaaacatcaaacgtgccgcccgttctgaatcgtattataacgggatctctacgaacctggcctcaaacgattatacccaacaagcaacccaaagctatggggcctaccccacccagcccgggcagggctattcccagcagagcagtcagccctacggacagcagagttacagtggttatagccagtccacggacacttcaggatatggccagagcagctattcttcttatggccagagccagaacacaggctatggaactcagtcaactccccagggatatggctcgactggcggctatggcagtagccagagctcccaatcgtcttacgggcagcagtcctcctaccctggctatggccagcagccagctcccagcagcacctcgggaagttacggtagcagttctcagagcagcagctatgggcagccccagagtgggagctacagccagcagcctagctatggtggacagcagcaaagctatggacagcagcaaagctataatccccctcagggctatggacagcagaaccagtacaacagcagcagtggtggtggaggtggaggtggaggtggaggtaactatggccaagatcaatcctccatgagtagtggtggtggcagtggtggcggttatggcaatcaagaccagagtggtggaggtggcagcggtggctatggacagcaggaccgtggaggccgcggcaggggtggcagtggtggcggcggcggcggcggcggtggtggttacaaccgcagcagtggtggctatgaacccagaggtcgtggaggtggccgtggaggcagaggtggcatgggcggaagtgaccgtggtggcttcaataaatttggtggccctcgggaccaaggatcacgtcatgactccgaacaggataattcagacaacaacaccatctttgtgcaaggcctgggtgagaatgttacaattgagtctgtggctgattacttcaagcagattggtattattaagacaaacaagaaaacgggacagcccatgattaatttgtacacagacagggaaactggcaagctgaagggagaggcaacggtctcttttgatgacccaccttcagctaaagcagctattgactggtttgatggtaaagaattctccggaaatcctatcaaggtctcatttgctactcgccgggcagactttaatcggggtggtggcaatggtcgtggaggccgagggcgaggaggacccatgggccgtggaggctatggaggtggtggcagtggtggtggtggccgaggaggatttcccagtggaggtggtggcggtggaggacagcagcgagctggtgactggaagtgtcctaatcccacctgtgagaatatgaacttctcttggaggaatgaatgcaaccagtgtaaggcccctaaaccagatggcccaggagggggaccaggtggctctcacatggggggtaactacggggatgatcgtcgtggtggcagaggaggcgataaaaaaccgctgaataccctgatctctgctactggtctgtggatgagtcgtaccggaaccattcataaaatcaaacaccacgaggttagccgttcgaaaatctatattgagatggcgtgtggcgatcatctggttgtgaacaatagccgctcttctcgtacagcacgtgcactgcgtcaccacaaatatcgtaaaacctgtaaacgttgccgtgtgtccgatgaggatctgaacaaattcctgacaaaagccaatgaggaccaaacaagcgtgaaagtgaaagtcgttagcgctcctacccgtactaaaaaagcaatgccgaaatccgttgctcgtgcccctaaaccactggaaaacactgaagcagcacaggcacagccgtctggaagcaaattctctccggccattcctgtttctacccaggagtccgtttctgttccagcaagtgtgagcaccagcattagcagtattagcaccggtgccaccgctagcgccctggttaaaggcaataccaatccgattacaagcatgtctgccccggttcaagcatcagctccagcactgacaaaatcccaaaccgatcgtctggaggttctgctgaatccgaaagacgaaatcagcctgaattccggcaaaccgtttcgtgaactggagagcgaactgctgtcacgtcgtaaaaaagacctgcaacaaatctatgccgaagaacgtgagaactatctggggaaactggaacgtgaaatcacccgctttttcgtggatcgtggctttctggagatcaaatccccgattctgattcctctggagtatatcgagcgtatgggcatcgacaatgataccgaactgagcaaacaaattttccgtgtggataaaaacttctgtctgcgccctatgctggcaccaaatctgtataactatctgcgcaaactggaccgtgccctgcctgatcctatcaaaatcttcgagatcggcccgtgttatcgtaaagagtccgacggtaaagaacatctggaggagtttaccatgctggcctttgcccaaatgggttcaggttgtactcgtgagaacctggaaagcatcatcaccgattttctgaaccacctgggcattgacttcaaaattgtgggcgacagctgtatggtgtatggcgacaccctggatgtcatgcacggcgacctggaactgtctagtgccgttgttggaccaattccgctggaccgtgagtggggtatcgacaaaccgtggatcggagcaggattcggtctggaacgcctgctgaaagtgaaacacgacttcaaaaacatcaaacgtgccgcccgttctgaatcgtattataacgggatctctacgaacctgtaa

SEQ ID NO: 478 - protein, 2254 aa, Artificial Sequence
  Description of Artificial Sequence: Synthetic polypeptide
  TOM20::EWSR1::PylRS(AA)::FUS::PylRS(AA)
MVGRNSAIAAGVCGALFIGYCIYFDRKRRSDPNFKNRLRERRKKQKLAKERAGLSKLPDLKDAEAVQKFFMASTDYSTYSQAAAQQGYSAYTAQPTQGYAQTTQAYGQQSYGTYGQPTDVSYTQAQTTATYGQTAYATSYGQPPTGYTTPTAPQAYSQPVQGYGTGAYDTTTATVTTTQASYAAQSAYGTQPAYPAYGQQPAATAPTRPQDGNKPTETSQPQSSTGGYNQPSLGYGQSNYSYPQVPGSYPMQPVTAPPSYPPTSYSSTQPTSYDQSSYSQQNTYGQPSSYGQQSSYGQQSSYGQQPPTSYPPQTGSYSQAPSQYSQQSSSYGQQSSFRQDHPSSMGVYGQESGGFSGPGENRSMSGPDNRGRGRGGFDRGGMSRGGRGGGRGGMGSAGERGGFNKPGGPMDEGPDLDLGPPVDPDEDSDNSAIYVQGLNDSVTLDDLADFFKQCGVVKMNKRTGQPMIHIYLDKETGKPKGDATVSYEDPPTAKAAVEWFDGKDFQGSKLKVSLARKKPPMNSMRGGLPPREGRGMPPPLRGGPGGPGGPGGPMGRMGGRGGDRGGFPPRGPRGSRGNPSGGGNVQHRAGDWQCPNPGCGNQNFAWRTECNQCKAPKPEGFLPPPFPPPGGDRGRGGPGGMRGGRGGLMDRGGPGGMFRGGRGGDRGGFRGGRGMDRGGFGGGRRGGPGGPPGPLMEQAIAYPYDVPDYAGAPGSAGSAAGSGASNFTQFVLVDNGGTGDVTVAPSNFANGIAEWISSNSRSQAYKVTCSVRQSSAQNRKYTIKVEVPKGAWRSYLNMELTIPIFATNSDCELIVKAMQGLLKDGNPIPSAIAANSGIYGLSPDRVRAVSHWSSACPVPLQLPPLERLTLDDKKPLNTLISATGLWMSRTGTIHKIKHHEVSRSKIYIEMACGDHLVVNNSRSSRTARALRHHKYRKTCKRCRVSDEDLNKFLTKANEDQTSVKVKVVSAPTRTKKAMPKSVARAPKPLENTEAAQAQPSGSKFSPAIPVSTQESVSVPASVSTSISSISTGATASALVKGNTNPITSMSAPVQASAPALTKSQTDRLEVLLNPKDEISLNSGKPFRELESELLSRRKKDLQQIYAEERENYLGKLEREITRFFVDRGFLEIKSPILIPLEYIERMGIDNDTELSKQIFRVDKNFCLRPMLAPNLYNYLRKLDRALPDPIKIFEIGPCYRKESDGKEHLEEFTMLAFAQMGSGCTRENLESIITDFLNHLGIDFKIVGDSCMVYGDTLDVMHGDLELSSAVVGPIPLDREWGIDKPWIGAGFGLERLLKVKHDFKNIKRAARSESYYNGISTNLASNDYTQQATQSYGAYPTQPGQGYSQQSSQPYGQQSYSGYSQSTDTSGYGQSSYSSYGQSQNTGYGTQSTPQGYGSTGGYGSSQSSQSSYGQQSSYPGYGQQPAPSSTSGSYGSSSQSSSYGQPQSGSYSQQPSYGGQQQSYGQQQSYNPPQGYGQQNQYNSSSGGGGGGGGGGNYGQDQSSMSSGGGSGGGYGNQDQSGGGGSGGYGQQDRGGRGRGGSGGGGGGGGGGYNRSSGGYEPRGRGGGRGGRGGMGGSDRGGFNKFGGPRDQGSRHDSEQDNSDNNTIFVQGLGENVTIESVADYFKQIGIIKTNKKTGQPMINLYTDRETGKLKGEATVSFDDPPSAKAAIDWFDGKEFSGNPIKVSFATRRADFNRGGGNGRGGRGRGGPMGRGGYGGGGSGGGGRGGFPSGGGGGGGQQRAGDWKCPNPTCENMNFSWRNECNQCKAPKPDGPGGGPGGSHMGGNYGDDRRGGRGGDKKPLNTLISATGLWMSRTGTIHKIKHHEVSRSKIYIEMACGDHLVVNNSRSSRTARALRHHKYRKTCKRCRVSDEDLNKFLTKANEDQTSVKVKVVSAPTRTKKAMPKSVARAPKPLENTEAAQAQPSGSKFSPAIPVSTQESVSVPASVSTSISSISTGATASALVKGNTNPITSMSAPVQASAPALTKSQTDRLEVLLNPKDEISLNSGKPFRELESELLSRRKKDLQQIYAEERENYLGKLEREITRFFVDRGFLEIKSPILIPLEYIERMGIDNDTELSKQIFRVDKNFCLRPMLAPNLYNYLRKLDRALPDPIKIFEIGPCYRKESDGKEHLEEFTMLAFAQMGSGCTRENLESIITDFLNHLGIDFKIVGDSCMVYGDTLDVMHGDLELSSAVVGPIPLDREWGIDKPWIGAGFGLERLLKVKHDFKNIKRAARSESYYNGISTNL

SEQ ID NO: 479 - DNA, 4245 bp, Artificial Sequence
  Description of Artificial Sequence: Synthetic polynucleotide
  LCK::PylRS(AF)::FUS::PylRS(AF)
atgggctgcgtgtgcagcagcaaccccgagggtaccgagctcgcgtgcccggtgccgctgcagctgccgccgctggaacgcctgaccctggatgataaaaaaccgctgaataccctgatctctgctactggtctgtggatgagtcgtaccggaaccattcataaaatcaaacaccacgaggttagccgttcgaaaatctatattgagatggcgtgtggcgatcatctggttgtgaacaatagccgctcttctcgtacagcacgtgcactgcgtcaccacaaatatcgtaaaacctgtaaacgttgccgtgtgtccgatgaggatctgaacaaattcctgacaaaagccaatgaggaccaaacaagcgtgaaagtgaaagtcgttagcgctcctacccgtactaaaaaagcaatgccgaaatccgttgctcgtgcccctaaaccactggaaaacactgaagcagcacaggcacagccgtctggaagcaaattctctccggccattcctgtttctacccaggagtccgtttctgttccagcaagtgtgagcaccagcattagcagtattagcaccggtgccaccgctagcgccctggttaaaggcaataccaatccgattacaagcatgtctgccccggttcaagcatcagctccagcactgacaaaatcccaaaccgatcgtctggaggttctgctgaatccgaaagacgaaatcagcctgaattccggcaaaccgtttcgtgaactggagagcgaactgctgtcacgtcgtaaaaaagacctgcaacaaatctatgccgaagaacgtgagaactatctggggaaactggaacgtgaaatcacccgctttttcgtggatcgtggctttctggagatcaaatccccgattctgattcctctggagtatatcgagcgtatgggcatcgacaatgataccgaactgagcaaacaaattttccgtgtggataaaaacttctgtctgcgccctatgctagcaccaaatctggctaactatctgcgcaaactggaccgtgccctgcctgatcctatcaaaatcttcgagatcggcccgtgttatcgtaaagagtccgacggtaaagaacatctggaggagtttaccatgctgaacttttgccaaatgggttcaggttgtactcgtgagaacctggaaagcatcatcaccgattttctgaaccacctgggcattgacttcaaaattgtgggcgacagctgtatggtgtttggcgacaccctggatgtcatgcacggcgacctggaactgtctagtgccgttgtgggcccaatcccgctggatcgtgagtggggtatcgacaaaccttggatcggtgcgggttttggtctggagcgtctgctgaaagtaaaacacgacttcaagaacatcaaacgtgctgcacgttccgagtcctattacaatggtatttctactaacctggcctcaaacgattatacccaacaagcaacccaaagctatggggcctaccccacccagcccgggcagggctattcccagcagagcagtcagccctacggacagcagagttacagtggttatagccagtccacggacacttcaggatatggccagagcagctattcttcttatggccagagccagaacacaggctatggaactcagtcaactccccagggatatggctcgactggcggctatggcagtagccagagctcccaatcgtcttacgggcagcagtcctcctaccctggctatggccagcagccagctcccagcagcacctcgggaagttacggtagcagttctcagagcagcagctatgggcagccccagagtgggagctacagccagcagcctagctatggtggacagcagcaaagctatggacagcagcaaagctataatccccctcagggctatggacagcagaaccagtacaacagcagcagtggtggtggaggtggaggtggaggtggaggtaactatggccaagatcaatcctccatgagtagtggtggtggcagtggtggcggttatggcaatcaagaccagagtggtggaggtggcagcggtggctatggacagcaggaccgtggaggccgcggcaggggtggcagtggtggcggcggcggcggcggcggtggtggttacaaccgcagcagtggtggctatgaacccagaggtcgtggaggtggccgtggaggcagaggtggcatgggcggaagtgaccgtggtggcttcaataaatttggtggccctcgggaccaaggatcacgtcatgactccgaacaggataattcagacaacaacaccatctttgtgcaaggcctgggtgagaatgttacaattgagtctgtggctgattacttcaagcagattggtattattaagacaaacaagaaaacgggacagcccatgattaatttgtacacagacagggaaactggcaagctgaagggagaggcaacggtctcttttgatgacccaccttcagctaaagcagctattgactggtttgatggtaaagaattctccggaaatcctatcaaggtctcatttgctactcgccgggcagactttaatcggggtggtggcaatggtcgtggaggccgagggcgaggaggacccatgggccgtggaggctatggaggtggtggcagtggtggtggtggccgaggaggatttcccagtggaggtggtggcggtggaggacagcagcgagctggtgactggaagtgtcctaatcccacctgtgagaatatgaacttctcttggaggaatgaatgcaaccagtgtaaggcccctaaaccagatggcccaggagggggaccaggtggctctcacatggggggtaactacggggatgatcgtcgtggtggcagaggaggcgataaaaaaccgctgaataccctgatctctgctactggtctgtggatgagtcgtaccggaaccattcataaaatcaaacaccacgaggttagccgttcgaaaatctatattgagatggcgtgtggcgatcatctggttgtgaacaatagccgctcttctcgtacagcacgtgcactgcgtcaccacaaatatcgtaaaacctgtaaacgttgccgtgtgtccgatgaggatctgaacaaattcctgacaaaagccaatgaggaccaaacaagcgtgaaagtgaaagtcgttagcgctcctacccgtactaaaaaagcaatgccgaaatccgttgctcgtgcccctaaaccactggaaaacactgaagcagcacaggcacagccgtctggaagcaaattctctccggccattcctgtttctacccaggagtccgtttctgttccagcaagtgtgagcaccagcattagcagtattagcaccggtgccaccgctagcgccctggttaaaggcaataccaatccgattacaagcatgtctgccccggttcaagcatcagctccagcactgacaaaatcccaaaccgatcgtctggaggttctgctgaatccgaaagacgaaatcagcctgaattccggcaaaccgtttcgtgaactggagagcgaactgctgtcacgtcgtaaaaaagacctgcaacaaatctatgccgaagaacgtgagaactatctggggaaactggaacgtgaaatcacccgctttttcgtggatcgtggctttctggagatcaaatccccgattctgattcctctggagtatatcgagcgtatgggcatcgacaatgataccgaactgagcaaacaaattttccgtgtggataaaaacttctgtctgcgccctatgctagcaccaaatctggctaactatctgcgcaaactggaccgtgccctgcctgatcctatcaaaatcttcgagatcggcccgtgttatcgtaaagagtccgacggtaaagaacatctggaggagtttaccatgctgaacttttgccaaatgggttcaggttgtactcgtgagaacctggaaagcatcatcaccgattttctgaaccacctgggcattgacttcaaaattgtgggcgacagctgtatggtgtttggcgacaccctggatgtcatgcacggcgacctggaactgtctagtgccgttgtgggcccaatcccgctggatcgtgagtggggtatcgacaaaccttggatcggtgcgggttttggtctggagcgtctgctgaaagtaaaacacgacttcaagaacatcaaacgtgctgcacgttccgagtcctattacaatggtatttctactaacctgtaa

SEQ ID NO: 480 - protein, 1414 aa, Artificial Sequence
  Description of Artificial Sequence: Synthetic polypeptide
  LCK::PylRS(AF)::FUS::PylRS(AF)
MGCVCSSNPEGTELACPVPLQLPPLERLTLDDKKPLNTLISATGLWMSRTGTIHKIKHHEVSRSKIYIEMACGDHLVVNNSRSSRTARALRHHKYRKTCKRCRVSDEDLNKFLTKANEDQTSVKVKVVSAPTRTKKAMPKSVARAPKPLENTEAAQAQPSGSKFSPAIPVSTQESVSVPASVSTSISSISTGATASALVKGNTNPITSMSAPVQASAPALTKSQTDRLEVLLNPKDEISLNSGKPFRELESELLSRRKKDLQQIYAEERENYLGKLEREITRFFVDRGFLEIKSPILIPLEYIERMGIDNDTELSKQIFRVDKNFCLRPMLAPNLANYLRKLDRALPDPIKIFEIGPCYRKESDGKEHLEEFTMLNFCQMGSGCTRENLESIITDFLNHLGIDFKIVGDSCMVFGDTLDVMHGDLELSSAVVGPIPLDREWGIDKPWIGAGFGLERLLKVKHDFKNIKRAARSESYYNGISTNLASNDYTQQATQSYGAYPTQPGQGYSQQSSQPYGQQSYSGYSQSTDTSGYGQSSYSSYGQSQNTGYGTQSTPQGYGSTGGYGSSQSSQSSYGQQSSYPGYGQQPAPSSTSGSYGSSSQSSSYGQPQSGSYSQQPSYGGQQQSYGQQQSYNPPQGYGQQNQYNSSSGGGGGGGGGGNYGQDQSSMSSGGGSGGGYGNQDQSGGGGSGGYGQQDRGGRGRGGSGGGGGGGGGGYNRSSGGYEPRGRGGGRGGRGGMGGSDRGGFNKFGGPRDQGSRHDSEQDNSDNNTIFVQGLGENVTIESVADYFKQIGIIKTNKKTGQPMINLYTDRETGKLKGEATVSFDDPPSAKAAIDWFDGKEFSGNPIKVSFATRRADFNRGGGNGRGGRGRGGPMGRGGYGGGGSGGGGRGGFPSGGGGGGGQQRAGDWKCPNPTCENMNFSWRNECNQCKAPKPDGPGGGPGGSHMGGNYGDDRRGGRGGDKKPLNTLISATGLWMSRTGTIHKIKHHEVSRSKIYIEMACGDHLVVNNSRSSRTARALRHHKYRKTCKRCRVSDEDLNKFLTKANEDQTSVKVKVVSAPTRTKKAMPKSVARAPKPLENTEAAQAQPSGSKFSPAIPVSTQESVSVPASVSTSISSISTGATASALVKGNTNPITSMSAPVQASAPALTKSQTDRLEVLLNPKDEISLNSGKPFRELESELLSRRKKDLQQIYAEERENYLGKLEREITRFFVDRGFLEIKSPILIPLEYIERMGIDNDTELSKQIFRVDKNFCLRPMLAPNLANYLRKLDRALPDPIKIFEIGPCYRKESDGKEHLEEFTMLNFCQMGSGCTRENLESIITDFLNHLGIDFKIVGDSCMVFGDTLDVMHGDLELSSAVVGPIPLDREWGIDKPWIGAGFGLERLLKVKHDFKNIKRAARSESYYNGISTNL

SEQ ID NO: 481 - DNA, 6171 bp, Artificial Sequence
  Description of Artificial Sequence: Synthetic polynucleotide
  LCK::FUS::PylRS(AF)::EWSR1::PylRS(AF)
atgggctgcgtgtgcagcagcaaccccgagggtaccgagctcgcctcaaacgattatacccaacaagcaacccaaagctatggggcctaccccacccagcccgggcagggctattcccagcagagcagtcagccctacggacagcagagttacagtggttatagccagtccacggacacttcaggatatggccagagcagctattcttcttatggccagagccagaacacaggctatggaactcagtcaactccccagggatatggctcgactggcggctatggcagtagccagagctcccaatcgtcttacgggcagcagtcctcctaccctggctatggccagcagccagctcccagcagcacctcgggaagttacggtagcagttctcagagcagcagctatgggcagccccagagtgggagctacagccagcagcctagctatggtggacagcagcaaagctatggacagcagcaaagctataatccccctcagggctatggacagcagaaccagtacaacagcagcagtggtggtggaggtggaggtggaggtggaggtaactatggccaagatcaatcctccatgagtagtggtggtggcagtggtggcggttatggcaatcaagaccagagtggtggaggtggcagcggtggctatggacagcaggaccgtggaggccgcggcaggggtggcagtggtggcggcggcggcggcggcggtggtggttacaaccgcagcagtggtggctatgaacccagaggtcgtggaggtggccgtggaggcagaggtggcatgggcggaagtgaccgtggtggcttcaataaatttggtggccctcgggaccaaggatcacgtcatgactccgaacaggataattcagacaacaacaccatctttgtgcaaggcctgggtgagaatgttacaattgagtctgtggctgattacttcaagcagattggtattattaagacaaacaagaaaacgggacagcccatgattaatttgtacacagacagggaaactggcaagctgaagggagaggcaacggtctcttttgatgacccaccttcagctaaagcagctattgactggtttgatggtaaagaattctccggaaatcctatcaaggtctcatttgctactcgccgggcagactttaatcggggtggtggcaatggtcgtggaggccgagggcgaggaggacccatgggccgtggaggctatggaggtggtggcagtggtggtggtggccgaggaggatttcccagtggaggtggtggcggtggaggacagcagcgagctggtgactggaagtgtcctaatcccacctgtgagaatatgaacttctcttggaggaatgaatgcaaccagtgtaaggcccctaaaccagatggcccaggagggggaccaggtggctctcacatggggggtaactacggggatgatcgtcgtggtggcagaggaggcggcgcccccggctccgccggctccgccgccggctccggcatggcgtgcccggtgccgctgcagctgccgccgctggaacgcctgaccctggatgataaaaaaccgctgaataccctgatctctgctactggtctgtggatgagtcgtaccggaaccattcataaaatcaaacaccacgaggttagccgttcgaaaatctatattgagatggcgtgtggcgatcatctggttgtgaacaatagccgctcttctcgtacagcacgtgcactgcgtcaccacaaatatcgtaaaacctgtaaacgttgccgtgtgtccgatgaggatctgaacaaattcctgacaaaagccaatgaggaccaaacaagcgtgaaagtgaaagtcgttagcgctcctacccgtactaaaaaagcaatgccgaaatccgttgctcgtgcccctaaaccactggaaaacactgaagcagcacaggcacagccgtctggaagcaaattctctccggccattcctgtttctacccaggagtccgtttctgttccagcaagtgtgagcaccagcattagcagtattagcaccggtgccaccgctagcgccctggttaaaggcaataccaatccgattacaagcatgtctgccccggttcaagcatcagctccagcactgacaaaatcccaaaccgatcgtctggaggttctgctgaatccgaaagacgaaatcagcctgaattccggcaaaccgtttcgtgaactggagagcgaactgctgtcacgtcgtaaaaaagacctgcaacaaatctatgccgaagaacgtgagaactatctggggaaactggaacgtgaaatcacccgctttttcgtggatcgtggctttctggagatcaaatccccgattctgattcctctggagtatatcgagcgtatgggcatcgacaatgataccgaactgagcaaacaaattttccgtgtggataaaaacttctgtctgcgccctatgctagcaccaaatctggctaactatctgcgcaaactggaccgtgccctgcctgatcctatcaaaatcttcgagatcggcccgtgttatcgtaaagagtccgacggtaaagaacatctggaggagtttaccatgctgaacttttgccaaatgggttcaggttgtactcgtgagaacctggaaagcatcatcaccgattttctgaaccacctgggcattgacttcaaaattgtgggcgacagctgtatggtgtttggcgacaccctggatgtcatgcacggcgacctggaactgtctagtgccgttgtgggcccaatcccgctggatcgtgagtggggtatcgacaaaccttggatcggtgcgggttttggtctggagcgtctgctgaaagtaaaacacgacttcaagaacatcaaacgtgctgcacgttccgagtcctattacaatggtatttctactaacctgatggcgtccacggattacagtacctatagccaagctgcagcgcagcagggctacagtgcttacaccgcccagcccactcaaggatatgcacagaccacccaggcatatgggcaacaaagctatggaacctatggacagcccactgatgtcagctatacccaggctcagaccactgcaacctatgggcagaccgcctatgcaacttcttatggacagcctcccactggttatactactccaactgccccccaggcatacagccagcctgtccaggggtatggcactggtgcttatgataccaccactgctacagtcaccaccacccaggcctcctatgcagctcagtctgcatatggcactcagcctgcttatccagcctatgggcagcagccagcagccactgcacctacaagaccgcaggatggaaacaagcccactgagactagtcaacctcaatctagcacagggggttacaaccagcccagcctaggatatggacagagtaactacagttatccccaggtacctgggagctaccccatgcagccagtcactgcacctccatcctaccctcctaccagctattcctctacacagccgactagttatgatcagagcagttactctcagcagaacacctatgggcaaccgagcagctatggacagcagagtagctatggtcaacaaagcagctatgggcagcagcctcccactagttacccaccccaaactggatcctacagccaagctccaagtcaatatagccaacagagcagcagctacgggcagcagagttcattccgacaggaccaccccagtagcatgggtgtttatgggcaggagtctggaggattttccggaccaggagagaaccggagcatgagtggccctgataaccggggcaggggaagagggggatttgatcgtggaggcatgagcagaggtgggcggggaggaggacgcggtggaatgggcagcgctggagagcgaggtggcttcaataagcctggtggacccatggatgaaggaccagatcttgatctaggcccacctgtagatccagatgaagactctgacaacagtgcaatttatgtacaaggattaaatgacagtgtgactctagatgatctggcagacttctttaagcagtgtggggttgttaagatgaacaagagaactgggcaacccatgatccacatctacctggacaaggaaacaggaaagcccaaaggcgatgccacagtgtcctatgaagacccacctactgccaaggctgccgtggaatggtttgatgggaaagattttcaagggagcaaacttaaagtctcccttgctcggaagaagcctccaatgaacagtatgcggggtggtctgccaccccgtgagggcagaggcatgccaccaccactccgtggaggtccaggaggcccaggaggtcctgggggacccatgggtcgcatgggaggccgtggaggagatagaggaggcttccctccaagaggaccccggggttcccgagggaacccctctggaggaggaaacgtccagcaccgagctggagactggcagtgtcccaatccgggttgtggaaaccagaacttcgcctggagaacagagtgcaaccagtgtaaggccccaaagcctgaaggcttcctcccgccaccctttccgcccccgggtggtgatcgtggcagaggtggccctggtggcatgcggggaggaagaggtggcctcatggatcgtggtggtcccggtggaatgttcagaggtggccgtggtggagacagaggtggcttccgtggtggccggggcatggaccgaggtggctttggtggaggaagacgaggtggccctggggggccccctggacctttgatggaacaggataaaaaaccgctgaataccctgatctctgctactggtctgtggatgagtcgtaccggaaccattcataaaatcaaacaccacgaggttagccgttcgaaaatctatattgagatggcgtgtggcgatcatctggttgtgaacaatagccgctcttctcgtacagcacgtgcactgcgtcaccacaaatatcgtaaaacctgtaaacgttgccgtgtgtccgatgaggatctgaacaaattcctgacaaaagccaatgaggaccaaacaagcgtgaaagtgaaagtcgttagcgctcctacccgtactaaaaaagcaatgccgaaatccgttgctcgtgcccctaaaccactggaaaacactgaagcagcacaggcacagccgtctggaagcaaattctctccggccattcctgtttctacccaggagtccgtttctgttccagcaagtgtgagcaccagcattagcagtattagcaccggtgccaccgctagcgccctggttaaaggcaataccaatccgattacaagcatgtctgccccggttcaagcatcagctccagcactgacaaaatcccaaaccgatcgtctggaggttctgctgaatccgaaagacgaaatcagcctgaattccggcaaaccgtttcgtgaactggagagcgaactgctgtcacgtcgtaaaaaagacctgcaacaaatctatgccgaagaacgtgagaactatctggggaaactggaacgtgaaatcacccgctttttcgtggatcgtggctttctggagatcaaatccccgattctgattcctctggagtatatcgagcgtatgggcatcgacaatgataccgaactgagcaaacaaattttccgtgtggataaaaacttctgtctgcgccctatgctagcaccaaatctggctaactatctgcgcaaactggaccgtgccctgcctgatcctatcaaaatcttcgagatcggcccgtgttatcgtaaagagtccgacggtaaagaacatctggaggagtttaccatgctgaacttttgccaaatgggttcaggttgtactcgtgagaacctggaaagcatcatcaccgattttctgaaccacctgggcattgacttcaaaattgtgggcgacagctgtatggtgtttggcgacaccctggatgtcatgcacggcgacctggaactgtctagtgccgttgtgggcccaatcccgctggatcgtgagtggggtatcgacaaaccttggatcggtgcgggttttggtctggagcgtctgctgaaagtaaaacacgacttcaagaacatcaaacgtgctgcacgttccgagtcctattacaatggtatttctactaacctgtaa

SEQ ID NO: 482 - protein, 2056 aa, Artificial Sequence
  Description of Artificial Sequence: Synthetic polypeptide
  LCK::FUS::PylRS(AF)::EWSR1::PylRS(AF)
MGCVCSSNPEGTELASNDYTQQATQSYGAYPTQPGQGYSQQSSQPYGQQSYSGYSQSTDTSGYGQSSYSSYGQSQNTGYGTQSTPQGYGSTGGYGSSQSSQSSYGQQSSYPGYGQQPAPSSTSGSYGSSSQSSSYGQPQSGSYSQQPSYGGQQQSYGQQQSYNPPQGYGQQNQYNSSSGGGGGGGGGGNYGQDQSSMSSGGGSGGGYGNQDQSGGGGSGGYGQQDRGGRGRGGSGGGGGGGGGGYNRSSGGYEPRGRGGGRGGRGGMGGSDRGGFNKFGGPRDQGSRHDSEQDNSDNNTIFVQGLGENVTIESVADYFKQIGIIKTNKKTGQPMINLYTDRETGKLKGEATVSFDDPPSAKAAIDWFDGKEFSGNPIKVSFATRRADFNRGGGNGRGGRGRGGPMGRGGYGGGGSGGGGRGGFPSGGGGGGGQQRAGDWKCPNPTCENMNFSWRNECNQCKAPKPDGPGGGPGGSHMGGNYGDDRRGGRGGGAPGSAGSAAGSGMACPVPLQLPPLERLTLDDKKPLNTLISATGLWMSRTGTIHKIKHHEVSRSKIYIEMACGDHLVVNNSRSSRTARALRHHKYRKTCKRCRVSDEDLNKFLTKANEDQTSVKVKVVSAPTRTKKAMPKSVARAPKPLENTEAAQAQPSGSKFSPAIPVSTQESVSVPASVSTSISSISTGATASALVKGNTNPITSMSAPVQASAPALTKSQTDRLEVLLNPKDEISLNSGKPFRELESELLSRRKKDLQQIYAEERENYLGKLEREITRFFVDRGFLEIKSPILIPLEYIERMGIDNDTELSKQIFRVDKNFCLRPMLAPNLANYLRKLDRALPDPIKIFEIGPCYRKESDGKEHLEEFTMLNFCQMGSGCTRENLESIITDFLNHLGIDFKIVGDSCMVFGDTLDVMHGDLELSSAVVGPIPLDREWGIDKPWIGAGFGLERLLKVKHDFKNIKRAARSESYYNGISTNLMASTDYSTYSQAAAQQGYSAYTAQPTQGYAQTTQAYGQQSYGTYGQPTDVSYTQAQTTATYGQTAYATSYGQPPTGYTTPTAPQAYSQPVQGYGTGAYDTTTATVTTTQASYAAQSAYGTQPAYPAYGQQPAATAPTRPQDGNKPTETSQPQSSTGGYNQPSLGYGQSNYSYPQVPGSYPMQPVTAPPSYPPTSYSSTQPTSYDQSSYSQQNTYGQPSSYGQQSSYGQQSSYGQQPPTSYPPQTGSYSQAPSQYSQQSSSYGQQSSFRQDHPSSMGVYGQESGGFSGPGENRSMSGPDNRGRGRGGFDRGGMSRGGRGGGRGGMGSAGERGGFNKPGGPMDEGPDLDLGPPVDPDEDSDNSAIYVQGLNDSVTLDDLADFFKQCGVVKMNKRTGQPMIHIYLDKETGKPKGDATVSYEDPPTAKAAVEWFDGKDFQGSKLKVSLARKKPPMNSMRGGLPPREGRGMPPPLRGGPGGPGGPGGPMGRMGGRGGDRGGFPPRGPRGSRGNPSGGGNVQHRAGDWQCPNPGCGNQNFAWRTECNQCKAPKPEGFLPPPFPPPGGDRGRGGPGGMRGGRGGLMDRGGPGGMFRGGRGGDRGGFRGGRGMDRGGFGGGRRGGPGGPPGPLMEQDKKPLNTLISATGLWMSRTGTIHKIKHHEVSRSKIYIEMACGDHLVVNNSRSSRTARALRHHKYRKTCKRCRVSDEDLNKFLTKANEDQTSVKVKVVSAPTRTKKAMPKSVARAPKPLENTEAAQAQPSGSKFSPAIPVSTQESVSVPASVSTSISSISTGATASALVKGNTNPITSMSAPVQASAPALTKSQTDRLEVLLNPKDEISLNSGKPFRELESELLSRRKKDLQQIYAEERENYLGKLEREITRFFVDRGFLEIKSPILIPLEYIERMGIDNDTELSKQIFRVDKNFCLRPMLAPNLANYLRKLDRALPDPIKIFEIGPCYRKESDGKEHLEEFTMLNFCQMGSGCTRENLESIITDFLNHLGIDFKIVGDSCMVFGDTLDVMHGDLELSSAVVGPIPLDREWGIDKPWIGAGFGLERLLKVKHDFKNIKRAARSESYYNGISTNL

SEQ ID NO: 483 - DNA, 5718 bp, Artificial Sequence
  Description of Artificial Sequence: Synthetic polynucleotide
  LCK::FUS::PylRS(AF)::FUS::PylRS(AF)
atgggctgcgtgtgcagcagcaaccccgagggtaccgagctcgcctcaaacgattatacccaacaagcaacccaaagctatggggcctaccccacccagcccgggcagggctattcccagcagagcagtcagccctacggacagcagagttacagtggttatagccagtccacggacacttcaggatatggccagagcagctattcttcttatggccagagccagaacacaggctatggaactcagtcaactccccagggatatggctcgactggcggctatggcagtagccagagctcccaatcgtcttacgggcagcagtcctcctaccctggctatggccagcagccagctcccagcagcacctcgggaagttacggtagcagttctcagagcagcagctatgggcagccccagagtgggagctacagccagcagcctagctatggtggacagcagcaaagctatggacagcagcaaagctataatccccctcagggctatggacagcagaaccagtacaacagcagcagtggtggtggaggtggaggtggaggtggaggtaactatggccaagatcaatcctccatgagtagtggtggtggcagtggtggcggttatggcaatcaagaccagagtggtggaggtggcagcggtggctatggacagcaggaccgtggaggccgcggcaggggtggcagtggtggcggcggcggcggcggcggtggtggttacaaccgcagcagtggtggctatgaacccagaggtcgtggaggtggccgtggaggcagaggtggcatgggcggaagtgaccgtggtggcttcaataaatttggtggccctcgggaccaaggatcacgtcatgactccgaacaggataattcagacaacaacaccatctttgtgcaaggcctgggtgagaatgttacaattgagtctgtggctgattacttcaagcagattggtattattaagacaaacaagaaaacgggacagcccatgattaatttgtacacagacagggaaactggcaagctgaagggagaggcaacggtctcttttgatgacccaccttcagctaaagcagctattgactggtttgatggtaaagaattctccggaaatcctatcaaggtctcatttgctactcgccgggcagactttaatcggggtggtggcaatggtcgtggaggccgagggcgaggaggacccatgggccgtggaggctatggaggtggtggcagtggtggtggtggccgaggaggatttcccagtggaggtggtggcggtggaggacagcagcgagctggtgactggaagtgtcctaatcccacctgtgagaatatgaacttctcttggaggaatgaatgcaaccagtgtaaggcccctaaaccagatggcccaggagggggaccaggtggctctcacatggggggtaactacggggatgatcgtcgtggtggcagaggaggcggcgcccccggctccgccggctccgccgccggctccggcatggcgtgcccggtgccgctgcagctgccgccgctggaacgcctgaccctggatgataaaaaaccgctgaataccctgatctctgctactggtctgtggatgagtcgtaccggaaccattcataaaatcaaacaccacgaggttagccgttcgaaaatctatattgagatggcgtgtggcgatcatctggttgtgaacaatagccgctcttctcgtacagcacgtgcactgcgtcaccacaaatatcgtaaaacctgtaaacgttgccgtgtgtccgatgaggatctgaacaaattcctgacaaaagccaatgaggaccaaacaagcgtgaaagtgaaagtcgttagcgctcctacccgtactaaaaaagcaatgccgaaatccgttgctcgtgcccctaaaccactggaaaacactgaagcagcacaggcacagccgtctggaagcaaattctctccggccattcctgtttctacccaggagtccgtttctgttccagcaagtgtgagcaccagcattagcagtattagcaccggtgccaccgctagcgccctggttaaaggcaataccaatccgattacaagcatgtctgccccggttcaagcatcagctccagcactgacaaaatcccaaaccgatcgtctggaggttctgctgaatccgaaagacgaaatcagcctgaattccggcaaaccgtttcgtgaactggagagcgaactgctgtcacgtcgtaaaaaagacctgcaacaaatctatgccgaagaacgtgagaactatctggggaaactggaacgtgaaatcacccgctttttcgtggatcgtggctttctggagatcaaatccccgattctgattcctctggagtatatcgagcgtatgggcatcgacaatgataccgaactgagcaaacaaattttccgtgtggataaaaacttctgtctgcgccctatgctagcaccaaatctggctaactatctgcgcaaactggaccgtgccctgcctgatcctatcaaaatcttcgagatcggcccgtgttatcgtaaagagtccgacggtaaagaacatctggaggagtttaccatgctgaacttttgccaaatgggttcaggttgtactcgtgagaacctggaaagcatcatcaccgattttctgaaccacctgggcattgacttcaaaattgtgggcgacagctgtatggtgtttggcgacaccctggatgtcatgcacggcgacctggaactgtctagtgccgttgtgggcccaatcccgctggatcgtgagtggggtatcgacaaaccttggatcggtgcgggttttggtctggagcgtctgctgaaagtaaaacacgacttcaagaacatcaaacgtgctgcacgttccgagtcctattacaatggtatttctactaacctggcctcaaacgattatacccaacaagcaacccaaagctatggggcctaccccacccagcccgggcagggctattcccagcagagcagtcagccctacggacagcagagttacagtggttatagccagtccacggacacttcaggatatggccagagcagctattcttcttatggccagagccagaacacaggctatggaactcagtcaactccccagggatatggctcgactggcggctatggcagtagccagagctcccaatcgtcttacgggcagcagtcctcctaccctggctatggccagcagccagctcccagcagcacctcgggaagttacggtagcagttctcagagcagcagctatgggcagccccagagtgggagctacagccagcagcctagctatggtggacagcagcaaagctatggacagcagcaaagctataatccccctcagggctatggacagcagaaccagtacaacagcagcagtggtggtggaggtggaggtggaggtggaggtaactatggccaagatcaatcctccatgagtagtggtggtggcagtggtggcggttatggcaatcaagaccagagtggtggaggtggcagcggtggctatggacagcaggaccgtggaggccgcggcaggggtggcagtggtggcggcggcggcggcggcggtggtggttacaaccgcagcagtggtggctatgaacccagaggtcgtggaggtggccgtggaggcagaggtggcatgggcggaagtgaccgtggtggcttcaataaatttggtggccctcgggaccaaggatcacgtcatgactccgaacaggataattcagacaacaacaccatctttgtgcaaggcctgggtgagaatgttacaattgagtctgtggctgattacttcaagcagattggtattattaagacaaacaagaaaacgggacagcccatgattaatttgtacacagacagggaaactggcaagctgaagggagaggcaacggtctcttttgatgacccaccttcagctaaagcagctattgactggtttgatggtaaagaattctccggaaatcctatcaaggtctcatttgctactcgccgggcagactttaatcggggtggtggcaatggtcgtggaggccgagggcgaggaggacccatgggccgtggaggctatggaggtggtggcagtggtggtggtggccgaggaggatttcccagtggaggtggtggcggtggaggacagcagcgagctggtgactggaagtgtcctaatcccacctgtgagaatatgaacttctcttggaggaatgaatgcaaccagtgtaaggcccctaaaccagatggcccaggagggggaccaggtggctctcacatggggggtaactacggggatgatcgtcgtggtggcagaggaggcgataaaaaaccgctgaataccctgatctctgctactggtctgtggatgagtcgtaccggaaccattcataaaatcaaacaccacgaggttagccgttcgaaaatctatattgagatggcgtgtggcgatcatctggttgtgaacaatagccgctcttctcgtacagcacgtgcactgcgtcaccacaaatatcgtaaaacctgtaaacgttgccgtgtgtccgatgaggatctgaacaaattcctgacaaaagccaatgaggaccaaacaagcgtgaaagtgaaagtcgttagcgctcctacccgtactaaaaaagcaatgccgaaatccgttgctcgtgcccctaaaccactggaaaacactgaagcagcacaggcacagccgtctggaagcaaattctctccggccattcctgtttctacccaggagtccgtttctgttccagcaagtgtgagcaccagcattagcagtattagcaccggtgccaccgctagcgccctggttaaaggcaataccaatccgattacaagcatgtctgccccggttcaagcatcagctccagcactgacaaaatcccaaaccgatcgtctggaggttctgctgaatccgaaagacgaaatcagcctgaattccggcaaaccgtttcgtgaactggagagcgaactgctgtcacgtcgtaaaaaagacctgcaacaaatctatgccgaagaacgtgagaactatctggggaaactggaacgtgaaatcacccgctttttcgtggatcgtggctttctggagatcaaatccccgattctgattcctctggagtatatcgagcgtatgggcatcgacaatgataccgaactgagcaaacaaattttccgtgtggataaaaacttctgtctgcgccctatgctagcaccaaatctggctaactatctgcgcaaactggaccgtgccctgcctgatcctatcaaaatcttcgagatcggcccgtgttatcgtaaagagtccgacggtaaagaacatctggaggagtttaccatgctgaacttttgccaaatgggttcaggttgtactcgtgagaacctggaaagcatcatcaccgattttctgaaccacctgggcattgacttcaaaattgtgggcgacagctgtatggtgtttggcgacaccctggatgtcatgcacggcgacctggaactgtctagtgccgttgtgggcccaatcccgctggatcgtgagtggggtatcgacaaaccttggatcggtgcgggttttggtctggagcgtctgctgaaagtaaaacacgacttcaagaacatcaaacgtgctgcacgttccgagtcctattacaatggtatttctactaacctgtaa

SEQ ID NO: 484 - protein, 1905 aa, Artificial Sequence
  Description of Artificial Sequence: Synthetic polypeptide
  LCK::FUS::PylRS(AF)::FUS::PylRS(AF)
MGCVCSSNPEGTELASNDYTQQATQSYGAYPTQPGQGYSQQSSQPYGQQSYSGYSQSTDTSGYGQSSYSSYGQSQNTGYGTQSTPQGYGSTGGYGSSQSSQSSYGQQSSYPGYGQQPAPSSTSGSYGSSSQSSSYGQPQSGSYSQQPSYGGQQQSYGQQQSYNPPQGYGQQNQYNSSSGGGGGGGGGGNYGQDQSSMSSGGGSGGGYGNQDQSGGGGSGGYGQQDRGGRGRGGSGGGGGGGGGGYNRSSGGYEPRGRGGGRGGRGGMGGSDRGGFNKFGGPRDQGSRHDSEQDNSDNNTIFVQGLGENVTIESVADYFKQIGIIKTNKKTGQPMINLYTDRETGKLKGEATVSFDDPPSAKAAIDWFDGKEFSGNPIKVSFATRRADFNRGGGNGRGGRGRGGPMGRGGYGGGGSGGGGRGGFPSGGGGGGGQQRAGDWKCPNPTCENMNFSWRNECNQCKAPKPDGPGGGPGGSHMGGNYGDDRRGGRGGGAPGSAGSAAGSGMACPVPLQLPPLERLTLDDKKPLNTLISATGLWMSRTGTIHKIKHHEVSRSKIYIEMACGDHLVVNNSRSSRTARALRHHKYRKTCKRCRVSDEDLNKFLTKANEDQTSVKVKVVSAPTRTKKAMPKSVARAPKPLENTEAAQAQPSGSKFSPAIPVSTQESVSVPASVSTSISSISTGATASALVKGNTNPITSMSAPVQASAPALTKSQTDRLEVLLNPKDEISLNSGKPFRELESELLSRRKKDLQQIYAEERENYLGKLEREITRFFVDRGFLEIKSPILIPLEYIERMGIDNDTELSKQIFRVDKNFCLRPMLAPNLANYLRKLDRALPDPIKIFEIGPCYRKESDGKEHLEEFTMLNFCQMGSGCTRENLESIITDFLNHLGIDFKIVGDSCMVFGDTLDVMHGDLELSSAVVGPIPLDREWGIDKPWIGAGFGLERLLKVKHDFKNIKRAARSESYYNGISTNLASNDYTQQATQSYGAYPTQPGQGYSQQSSQPYGQQSYSGYSQSTDTSGYGQSSYSSYGQSQNTGYGTQSTPQGYGSTGGYGSSQSSQSSYGQQSSYPGYGQQPAPSSTSGSYGSSSQSSSYGQPQSGSYSQQPSYGGQQQSYGQQQSYNPPQGYGQQNQYNSSSGGGGGGGGGGNYGQDQSSMSSGGGSGGGYGNQDQSGGGGSGGYGQQDRGGRGRGGSGGGGGGGGGGYNRSSGGYEPRGRGGGRGGRGGMGGSDRGGFNKFGGPRDQGSRHDSEQDNSDNNTIFVQGLGENVTIESVADYFKQIGIIKTNKKTGQPMINLYTDRETGKLKGEATVSFDDPPSAKAAIDWFDGKEFSGNPIKVSFATRRADFNRGGGNGRGGRGRGGPMGRGGYGGGGSGGGGRGGFPSGGGGGGGQQRAGDWKCPNPTCENMNFSWRNECNQCKAPKPDGPGGGPGGSHMGGNYGDDRRGGRGGDKKPLNTLISATGLWMSRTGTIHKIKHHEVSRSKIYIEMACGDHLVVNNSRSSRTARALRHHKYRKTCKRCRVSDEDLNKFLTKANEDQTSVKVKVVSAPTRTKKAMPKSVARAPKPLENTEAAQAQPSGSKFSPAIPVSTQESVSVPASVSTSISSISTGATASALVKGNTNPITSMSAPVQASAPALTKSQTDRLEVLLNPKDEISLNSGKPFRELESELLSRRKKDLQQIYAEERENYLGKLEREITRFFVDRGFLEIKSPILIPLEYIERMGIDNDTELSKQIFRVDKNFCLRPMLAPNLANYLRKLDRALPDPIKIFEIGPCYRKESDGKEHLEEFTMLNFCQMGSGCTRENLESIITDFLNHLGIDFKIVGDSCMVFGDTLDVMHGDLELSSAVVGPIPLDREWGIDKPWIGAGFGLERLLKVKHDFKNIKRAARSESYYNGISTNL

SEQ ID NO: 485 - DNA, 6390 bp, Artificial Sequence
  Description of Artificial Sequence: Synthetic polynucleotide
  TOM20::FUS::PylRS(AF)::EWSR1::PylRS(AF)
atggtgggtcggaacagcgccatcgccgccggtgtatgcggggcccttttcattgggtactgcatctacttcgaccgcaaaagacgaagtgaccccaacttcaagaacaggcttcgagaacgaagaaagaaacagaagcttgccaaggagagagctgggctttccaagttacctgaccttaaagatgctgaagctgttcagaaattcttcatggcctcaaacgattatacccaacaagcaacccaaagctatggggcctaccccacccagcccgggcagggctattcccagcagagcagtcagccctacggacagcagagttacagtggttatagccagtccacggacacttcaggatatggccagagcagctattcttcttatggccagagccagaacacaggctatggaactcagtcaactccccagggatatggctcgactggcggctatggcagtagccagagctcccaatcgtcttacgggcagcagtcctcctaccctggctatggccagcagccagctcccagcagcacctcgggaagttacggtagcagttctcagagcagcagctatgggcagccccagagtgggagctacagccagcagcctagctatggtggacagcagcaaagctatggacagcagcaaagctataatccccctcagggctatggacagcagaaccagtacaacagcagcagtggtggtggaggtggaggtggaggtggaggtaactatggccaagatcaatcctccatgagtagtggtggtggcagtggtggcggttatggcaatcaagaccagagtggtggaggtggcagcggtggctatggacagcaggaccgtggaggccgcggcaggggtggcagtggtggcggcggcggcggcggcggtggtggttacaaccgcagcagtggtggctatgaacccagaggtcgtggaggtggccgtggaggcagaggtggcatgggcggaagtgaccgtggtggcttcaataaatttggtggccctcgggaccaaggatcacgtcatgactccgaacaggataattcagacaacaacaccatctttgtgcaaggcctgggtgagaatgttacaattgagtctgtggctgattacttcaagcagattggtattattaagacaaacaagaaaacgggacagcccatgattaatttgtacacagacagggaaactggcaagctgaagggagaggcaacggtctcttttgatgacccaccttcagctaaagcagctattgactggtttgatggtaaagaattctccggaaatcctatcaaggtctcatttgctactcgccgggcagactttaatcggggtggtggcaatggtcgtggaggccgagggcgaggaggacccatgggccgtggaggctatggaggtggtggcagtggtggtggtggccgaggaggatttcccagtggaggtggtggcggtggaggacagcagcgagctggtgactggaagtgtcctaatcccacctgtgagaatatgaacttctcttggaggaatgaatgcaaccagtgtaaggcccctaaaccagatggcccaggagggggaccaggtggctctcacatggggggtaactacggggatgatcgtcgtggtggcagaggaggcgcgatcgcaggcaagcctattcccaaccccctgctgggcctggatagcaccggagcaccaggaagtgctggttctgctgctggtagtggagcgtgcccggtgccgctgcagctgccgccgctggaacgcctgaccctggatgataaaaaaccgctgaataccctgatctctgctactggtctgtggatgagtcgtaccggaaccattcataaaatcaaacaccacgaggttagccgttcgaaaatctatattgagatggcgtgtggcgatcatctggttgtgaacaatagccgctcttctcgtacagcacgtgcactgcgtcaccacaaatatcgtaaaacctgtaaacgttgccgtgtgtccgatgaggatctgaacaaattcctgacaaaagccaatgaggaccaaacaagcgtgaaagtgaaagtcgttagcgctcctacccgtactaaaaaagcaatgccgaaatccgttgctcgtgcccctaaaccactggaaaacactgaagcagcacaggcacagccgtctggaagcaaattctctccggccattcctgtttctacccaggagtccgtttctgttccagcaagtgtgagcaccagcattagcagtattagcaccggtgccaccgctagcgccctggttaaaggcaataccaatccgattacaagcatgtctgccccggttcaagcatcagctccagcactgacaaaatcccaaaccgatcgtctggaggttctgctgaatccgaaagacgaaatcagcctgaattccggcaaaccgtttcgtgaactggagagcgaactgctgtcacgtcgtaaaaaagacctgcaacaaatctatgccgaagaacgtgagaactatctggggaaactggaacgtgaaatcacccgctttttcgtggatcgtggctttctggagatcaaatccccgattctgattcctctggagtatatcgagcgtatgggcatcgacaatgataccgaactgagcaaacaaattttccgtgtggataaaaacttctgtctgcgccctatgctagcaccaaatctggctaactatctgcgcaaactggaccgtgccctgcctgatcctatcaaaatcttcgagatcggcccgtgttatcgtaaagagtccgacggtaaagaacatctggaggagtttaccatgctgaacttttgccaaatgggttcaggttgtactcgtgagaacctggaaagcatcatcaccgattttctgaaccacctgggcattgacttcaaaattgtgggcgacagctgtatggtgtttggcgacaccctggatgtcatgcacggcgacctggaactgtctagtgccgttgtgggcccaatcccgctggatcgtgagtggggtatcgacaaaccttggatcggtgcgggttttggtctggagcgtctgctgaaagtaaaacacgacttcaagaacatcaaacgtgctgcacgttccgagtcctattacaatggtatttctactaacctgatggcgtccacggattacagtacctatagccaagctgcagcgcagcagggctacagtgcttacaccgcccagcccactcaaggatatgcacagaccacccaggcatatgggcaacaaagctatggaacctatggacagcccactgatgtcagctatacccaggctcagaccactgcaacctatgggcagaccgcctatgcaacttcttatggacagcctcccactggttatactactccaactgccccccaggcatacagccagcctgtccaggggtatggcactggtgcttatgataccaccactgctacagtcaccaccacccaggcctcctatgcagctcagtctgcatatggcactcagcctgcttatccagcctatgggcagcagccagcagccactgcacctacaagaccgcaggatggaaacaagcccactgagactagtcaacctcaatctagcacagggggttacaaccagcccagcctaggatatggacagagtaactacagttatccccaggtacctgggagctaccccatgcagccagtcactgcacctccatcctaccctcctaccagctattcctctacacagccgactagttatgatcagagcagttactctcagcagaacacctatgggcaaccgagcagctatggacagcagagtagctatggtcaacaaagcagctatgggcagcagcctcccactagttacccaccccaaactggatcctacagccaagctccaagtcaatatagccaacagagcagcagctacgggcagcagagttcattccgacaggaccaccccagtagcatgggtgtttatgggcaggagtctggaggattttccggaccaggagagaaccggagcatgagtggccctgataaccggggcaggggaagagggggatttgatcgtggaggcatgagcagaggtgggcggggaggaggacgcggtggaatgggcagcgctggagagcgaggtggcttcaataagcctggtggacccatggatgaaggaccagatcttgatctaggcccacctgtagatccagatgaagactctgacaacagtgcaatttatgtacaaggattaaatgacagtgtgactctagatgatctggcagacttctttaagcagtgtggggttgttaagatgaacaagagaactgggcaacccatgatccacatctacctggacaaggaaacaggaaagcccaaaggcgatgccacagtgtcctatgaagacccacctactgccaaggctgccgtggaatggtttgatgggaaagattttcaagggagcaaacttaaagtctcccttgctcggaagaagcctccaatgaacagtatgcggggtggtctgccaccccgtgagggcagaggcatgccaccaccactccgtggaggtccaggaggcccaggaggtcctgggggacccatgggtcgcatgggaggccgtggaggagatagaggaggcttccctccaagaggaccccggggttcccgagggaacccctctggaggaggaaacgtccagcaccgagctggagactggcagtgtcccaatccgggttgtggaaaccagaacttcgcctggagaacagagtgcaaccagtgtaaggccccaaagcctgaaggcttcctcccgccaccctttccgcccccgggtggtgatcgtggcagaggtggccctggtggcatgcggggaggaagaggtggcctcatggatcgtggtggtcccggtggaatgttcagaggtggccgtggtggagacagaggtggcttccgtggtggccggggcatggaccgaggtggctttggtggaggaagacgaggtggccctggggggccccctggacctttgatggaacaggataaaaaaccgctgaataccctgatctctgctactggtctgtggatgagtcgtaccggaaccattcataaaatcaaacaccacgaggttagccgttcgaaaatctatattgagatggcgtgtggcgatcatctggttgtgaacaatagccgctcttctcgtacagcacgtgcactgcgtcaccacaaatatcgtaaaacctgtaaacgttgccgtgtgtccgatgaggatctgaacaaattcctgacaaaagccaatgaggaccaaacaagcgtgaaagtgaaagtcgttagcgctcctacccgtactaaaaaagcaatgccgaaatccgttgctcgtgcccctaaaccactggaaaacactgaagcagcacaggcacagccgtctggaagcaaattctctccggccattcctgtttctacccaggagtccgtttctgttccagcaagtgtgagcaccagcattagcagtattagcaccggtgccaccgctagcgccctggttaaaggcaataccaatccgattacaagcatgtctgccccggttcaagcatcagctccagcactgacaaaatcccaaaccgatcgtctggaggttctgctgaatccgaaagacgaaatcagcctgaattccggcaaaccgtttcgtgaactggagagcgaactgctgtcacgtcgtaaaaaagacctgcaacaaatctatgccgaagaacgtgagaactatctggggaaactggaacgtgaaatcacccgctttttcgtggatcgtggctttctggagatcaaatccccgattctgattcctctggagtatatcgagcgtatgggcatcgacaatgataccgaactgagcaaacaaattttccgtgtggataaaaacttctgtctgcgccctatgctagcaccaaatctggctaactatctgcgcaaactggaccgtgccctgcctgatcctatcaaaatcttcgagatcggcccgtgttatcgtaaagagtccgacggtaaagaacatctggaggagtttaccatgctgaacttttgccaaatgggttcaggttgtactcgtgagaacctggaaagcatcatcaccgattttctgaaccacctgggcattgacttcaaaattgtgggcgacagctgtatggtgtttggcgacaccctggatgtcatgcacggcgacctggaactgtctagtgccgttgtgggcccaatcccgctggatcgtgagtggggtatcgacaaaccttggatcggtgcgggttttggtctggagcgtctgctgaaagtaaaacacgacttcaagaacatcaaacgtgctgcacgttccgagtcctattacaatggtatttctactaacctgtaa

SEQ ID NO: 486 - protein, 2129 aa, Artificial Sequence
  Description of Artificial Sequence: Synthetic polypeptide
  TOM20::FUS::PylRS(AF)::EWSR1::PylRS(AF)
MVGRNSAIAAGVCGALFIGYCIYFDRKRRSDPNFKNRLRERRKKQKLAKERAGLSKLPDLKDAEAVQKFFMASNDYTQQATQSYGAYPTQPGQGYSQQSSQPYGQQSYSGYSQSTDTSGYGQSSYSSYGQSQNTGYGTQSTPQGYGSTGGYGSSQSSQSSYGQQSSYPGYGQQPAPSSTSGSYGSSSQSSSYGQPQSGSYSQQPSYGGQQQSYGQQQSYNPPQGYGQQNQYNSSSGGGGGGGGGGNYGQDQSSMSSGGGSGGGYGNQDQSGGGGSGGYGQQDRGGRGRGGSGGGGGGGGGGYNRSSGGYEPRGRGGGRGGRGGMGGSDRGGFNKFGGPRDQGSRHDSEQDNSDNNTIFVQGLGENVTIESVADYFKQIGIIKTNKKTGQPMINLYTDRETGKLKGEATVSFDDPPSAKAAIDWFDGKEFSGNPIKVSFATRRADFNRGGGNGRGGRGRGGPMGRGGYGGGGSGGGGRGGFPSGGGGGGGQQRAGDWKCPNPTCENMNFSWRNECNQCKAPKPDGPGGGPGGSHMGGNYGDDRRGGRGGAIAGKPIPNPLLGLDSTGAPGSAGSAAGSGACPVPLQLPPLERLTLDDKKPLNTLISATGLWMSRTGTIHKIKHHEVSRSKIYIEMACGDHLVVNNSRSSRTARALRHHKYRKTCKRCRVSDEDLNKFLTKANEDQTSVKVKVVSAPTRTKKAMPKSVARAPKPLENTEAAQAQPSGSKFSPAIPVSTQESVSVPASVSTSISSISTGATASALVKGNTNPITSMSAPVQASAPALTKSQTDRLEVLLNPKDEISLNSGKPFRELESELLSRRKKDLQQIYAEERENYLGKLEREITRFFVDRGFLEIKSPILIPLEYIERMGIDNDTELSKQIFRVDKNFCLRPMLAPNLANYLRKLDRALPDPIKIFEIGPCYRKESDGKEHLEEFTMLNFCQMGSGCTRENLESIITDFLNHLGIDFKIVGDSCMVFGDTLDVMHGDLELSSAVVGPIPLDREWGIDKPWIGAGFGLERLLKVKHDFKNIKRAARSESYYNGISTNLMASTDYSTYSQAAAQQGYSAYTAQPTQGYAQTTQAYGQQSYGTYGQPTDVSYTQAQTTATYGQTAYATSYGQPPTGYTTPTAPQAYSQPVQGYGTGAYDTTTATVTTTQASYAAQSAYGTQPAYPAYGQQPAATAPTRPQDGNKPTETSQPQSSTGGYNQPSLGYGQSNYSYPQVPGSYPMQPVTAPPSYPPTSYSSTQPTSYDQSSYSQQNTYGQPSSYGQQSSYGQQSSYGQQPPTSYPPQTGSYSQAPSQYSQQSSSYGQQSSFRQDHPSSMGVYGQESGGFSGPGENRSMSGPDNRGRGRGGFDRGGMSRGGRGGGRGGMGSAGERGGFNKPGGPMDEGPDLDLGPPVDPDEDSDNSAIYVQGLNDSVTLDDLADFFKQCGVVKMNKRTGQPMIHIYLDKETGKPKGDATVSYEDPPTAKAAVEWFDGKDFQGSKLKVSLARKKPPMNSMRGGLPPREGRGMPPPLRGGPGGPGGPGGPMGRMGGRGGDRGGFPPRGPRGSRGNPSGGGNVQHRAGDWQCPNPGCGNQNFAWRTECNQCKAPKPEGFLPPPFPPPGGDRGRGGPGGMRGGRGGLMDRGGPGGMFRGGRGGDRGGFRGGRGMDRGGFGGGRRGGPGGPPGPLMEQDKKPLNTLISATGLWMSRTGTIHKIKHHEVSRSKIYIEMACGDHLVVNNSRSSRTARALRHHKYRKTCKRCRVSDEDLNKFLTKANEDQTSVKVKVVSAPTRTKKAMPKSVARAPKPLENTEAAQAQPSGSKFSPAIPVSTQESVSVPASVSTSISSISTGATASALVKGNTNPITSMSAPVQASAPALTKSQTDRLEVLLNPKDEISLNSGKPFRELESELLSRRKKDLQQIYAEERENYLGKLEREITRFFVDRGFLEIKSPILIPLEYIERMGIDNDTELSKQIFRVDKNFCLRPMLAPNLANYLRKLDRALPDPIKIFEIGPCYRKESDGKEHLEEFTMLNFCQMGSGCTRENLESIITDFLNHLGIDFKIVGDSCMVFGDTLDVMHGDLELSSAVVGPIPLDREWGIDKPWIGAGFGLERLLKVKHDFKNIKRAARSESYYNGISTNL

SEQ ID NO: 487 - DNA, 5937 bp, Artificial Sequence
  Description of Artificial Sequence: Synthetic polynucleotide
  TOM20::FUS::PylRS(AF)::FUS::PylRS(AF)
atggtgggtcggaacagcgccatcgccgccggtgtatgcggggcccttttcattgggtactgcatctacttcgaccgcaaaagacgaagtgaccccaacttcaagaacaggcttcgagaacgaagaaagaaacagaagcttgccaaggagagagctgggctttccaagttacctgaccttaaagatgctgaagctgttcagaaattcttcatggcctcaaacgattatacccaacaagcaacccaaagctatggggcctaccccacccagcccgggcagggctattcccagcagagcagtcagccctacggacagcagagttacagtggttatagccagtccacggacacttcaggatatggccagagcagctattcttcttatggccagagccagaacacaggctatggaactcagtcaactccccagggatatggctcgactggcggctatggcagtagccagagctcccaatcgtcttacgggcagcagtcctcctaccctggctatggccagcagccagctcccagcagcacctcgggaagttacggtagcagttctcagagcagcagctatgggcagccccagagtgggagctacagccagcagcctagctatggtggacagcagcaaagctatggacagcagcaaagctataatccccctcagggctatggacagcagaaccagtacaacagcagcagtggtggtggaggtggaggtggaggtggaggtaactatggccaagatcaatcctccatgagtagtggtggtggcagtggtggcggttatggcaatcaagaccagagtggtggaggtggcagcggtggctatggacagcaggaccgtggaggccgcggcaggggtggcagtggtggcggcggcggcggcggcggtggtggttacaaccgcagcagtggtggctatgaacccagaggtcgtggaggtggccgtggaggcagaggtggcatgggcggaagtgaccgtggtggcttcaataaatttggtggccctcgggaccaaggatcacgtcatgactccgaacaggataattcagacaacaacaccatctttgtgcaaggcctgggtgagaatgttacaattgagtctgtggctgattacttcaagcagattggtattattaagacaaacaagaaaacgggacagcccatgattaatttgtacacagacagggaaactggcaagctgaagggagaggcaacggtctcttttgatgacccaccttcagctaaagcagctattgactggtttgatggtaaagaattctccggaaatcctatcaaggtctcatttgctactcgccgggcagactttaatcggggtggtggcaatggtcgtggaggccgagggcgaggaggacccatgggccgtggaggctatggaggtggtggcagtggtggtggtggccgaggaggatttcccagtggaggtggtggcggtggaggacagcagcgagctggtgactggaagtgtcctaatcccacctgtgagaatatgaacttctcttggaggaatgaatgcaaccagtgtaaggcccctaaaccagatggcccaggagggggaccaggtggctctcacatggggggtaactacggggatgatcgtcgtggtggcagaggaggcgcgatcgcaggcaagcctattcccaaccccctgctgggcctggatagcaccggagcaccaggaagtgctggttctgctgctggtagtggagcgtgcccggtgccgctgcagctgccgccgctggaacgcctgaccctggatgataaaaaaccgctgaataccctgatctctgctactggtctgtggatgagtcgtaccggaaccattcataaaatcaaacaccacgaggttagccgttcgaaaatctatattgagatggcgtgtggcgatcatctggttgtgaacaatagccgctcttctcgtacagcacgtgcactgcgtcaccacaaatatcgtaaaacctgtaaacgttgccgtgtgtccgatgaggatctgaacaaattcctgacaaaagccaatgaggaccaaacaagcgtgaaagtgaaagtcgttagcgctcctacccgtactaaaaaagcaatgccgaaatccgttgctcgtgcccctaaaccactggaaaacactgaagcagcacaggcacagccgtctggaagcaaattctctccggccattcctgtttctacccaggagtccgtttctgttccagcaagtgtgagcaccagcattagcagtattagcaccggtgccaccgctagcgccctggttaaaggcaataccaatccgattacaagcatgtctgccccggttcaagcatcagctccagcactgacaaaatcccaaaccgatcgtctggaggttctgctgaatccgaaagacgaaatcagcctgaattccggcaaaccgtttcgtgaactggagagcgaactgctgtcacgtcgtaaaaaagacctgcaacaaatctatgccgaagaacgtgagaactatctggggaaactggaacgtgaaatcacccgctttttcgtggatcgtggctttctggagatcaaatccccgattctgattcctctggagtatatcgagcgtatgggcatcgacaatgataccgaactgagcaaacaaattttccgtgtggataaaaacttctgtctgcgccctatgctagcaccaaatctggctaactatctgcgcaaactggaccgtgccctgcctgatcctatcaaaatcttcgagatcggcccgtgttatcgtaaagagtccgacggtaaagaacatctggaggagtttaccatgctgaacttttgccaaatgggttcaggttgtactcgtgagaacctggaaagcatcatcaccgattttctgaaccacctgggcattgacttcaaaattgtgggcgacagctgtatggtgtttggcgacaccctggatgtcatgcacggcgacctggaactgtctagtgccgttgtgggcccaatcccgctggatcgtgagtggggtatcgacaaaccttggatcggtgcgggttttggtctggagcgtctgctgaaagtaaaacacgacttcaagaacatcaaacgtgctgcacgttccgagtcctattacaatggtatttctactaacctggcctcaaacgattatacccaacaagcaacccaaagctatggggcctaccccacccagcccgggcagggctattcccagcagagcagtcagccctacggacagcagagttacagtggttatagccagtccacggacacttcaggatatggccagagcagctattcttcttatggccagagccagaacacaggctatggaactcagtcaactccccagggatatggctcgactggcggctatggcagtagccagagctcccaatcgtcttacgggcagcagtcctcctaccctggctatggccagcagccagctcccagcagcacctcgggaagttacggtagcagttctcagagcagcagctatgggcagccccagagtgggagctacagccagcagcctagctatggtggacagcagcaaagctatggacagcagcaaagctataatccccctcagggctatggacagcagaaccagtacaacagcagcagtggtggtggaggtggaggtggaggtggaggtaactatggccaagatcaatcctccatgagtagtggtggtggcagtggtggcggttatggcaatcaagaccagagtggtggaggtggcagcggtggctatggacagcaggaccgtggaggccgcggcaggggtggcagtggtggcggcggcggcggcggcggtggtggttacaaccgcagcagtggtggctatgaacccagaggtcgtggaggtggccgtggaggcagaggtggcatgggcggaagtgaccgtggtggcttcaataaatttggtggccctcgggaccaaggatcacgtcatgactccgaacaggataattcagacaacaacaccatctttgtgcaaggcctgggtgagaatgttacaattgagtctgtggctgattacttcaagcagattggtattattaagacaaacaagaaaacgggacagcccatgattaatttgtacacagacagggaaactggcaagctgaagggagaggcaacggtctcttttgatgacccaccttcagctaaagcagctattgactggtttgatggtaaagaattctccggaaatcctatcaaggtctcatttgctactcgccgggcagactttaatcggggtggtggcaatggtcgtggaggccgagggcgaggaggacccatgggccgtggaggctatggaggtggtggcagtggtggtggtggccgaggaggatttcccagtggaggtggtggcggtggaggacagcagcgagctggtgactggaagtgtcctaatcccacctgtgagaatatgaacttctcttggaggaatgaatgcaaccagtgtaaggcccctaaaccagatggcccaggagggggaccaggtggctctcacatggggggtaactacggggatgatcgtcgtggtggcagaggaggcgataaaaaaccgctgaataccctgatctctgctactggtctgtggatgagtcgtaccggaaccattcataaaatcaaacaccacgaggttagccgttcgaaaatctatattgagatggcgtgtggcgatcatctggttgtgaacaatagccgctcttctcgtacagcacgtgcactgcgtcaccacaaatatcgtaaaacctgtaaacgttgccgtgtgtccgatgaggatctgaacaaattcctgacaaaagccaatgaggaccaaacaagcgtgaaagtgaaagtcgttagcgctcctacccgtactaaaaaagcaatgccgaaatccgttgctcgtgcccctaaaccactggaaaacactgaagcagcacaggcacagccgtctggaagcaaattctctccggccattcctgtttctacccaggagtccgtttctgttccagcaagtgtgagcaccagcattagcagtattagcaccggtgccaccgctagcgccctggttaaaggcaataccaatccgattacaagcatgtctgccccggttcaagcatcagctccagcactgacaaaatcccaaaccgatcgtctggaggttctgctgaatccgaaagacgaaatcagcctgaattccggcaaaccgtttcgtgaactggagagcgaactgctgtcacgtcgtaaaaaagacctgcaacaaatctatgccgaagaacgtgagaactatctggggaaactggaacgtgaaatcacccgctttttcgtggatcgtggctttctggagatcaaatccccgattctgattcctctggagtatatcgagcgtatgggcatcgacaatgataccgaactgagcaaacaaattttccgtgtggataaaaacttctgtctgcgccctatgctagcaccaaatctggctaactatctgcgcaaactggaccgtgccctgcctgatcctatcaaaatcttcgagatcggcccgtgttatcgtaaagagtccgacggtaaagaacatctggaggagtttaccatgctgaacttttgccaaatgggttcaggttgtactcgtgagaacctggaaagcatcatcaccgattttctgaaccacctgggcattgacttcaaaattgtgggcgacagctgtatggtgtttggcgacaccctggatgtcatgcacggcgacctggaactgtctagtgccgttgtgggcccaatcccgctggatcgtgagtggggtatcgacaaaccttggatcggtgcgggttttggtctggagcgtctgctgaaagtaaaacacgacttcaagaacatcaaacgtgctgcacgttccgagtcctattacaatggtatttctactaacctgtaa

SEQ ID NO: 488 - protein, 1978 aa, Artificial Sequence
  Description of Artificial Sequence: Synthetic polypeptide
  TOM20::FUS::PylRS(AF)::FUS::PylRS(AF)
MVGRNSAIAAGVCGALFIGYCIYFDRKRRSDPNFKNRLRERRKKQKLAKERAGLSKLPDLKDAEAVQKFFMASNDYTQQATQSYGAYPTQPGQGYSQQSSQPYGQQSYSGYSQSTDTSGYGQSSYSSYGQSQNTGYGTQSTPQGYGSTGGYGSSQSSQSSYGQQSSYPGYGQQPAPSSTSGSYGSSSQSSSYGQPQSGSYSQQPSYGGQQQSYGQQQSYNPPQGYGQQNQYNSSSGGGGGGGGGGNYGQDQSSMSSGGGSGGGYGNQDQSGGGGSGGYGQQDRGGRGRGGSGGGGGGGGGGYNRSSGGYEPRGRGGGRGGRGGMGGSDRGGFNKFGGPRDQGSRHDSEQDNSDNNTIFVQGLGENVTIESVADYFKQIGIIKTNKKTGQPMINLYTDRETGKLKGEATVSFDDPPSAKAAIDWFDGKEFSGNPIKVSFATRRADFNRGGGNGRGGRGRGGPMGRGGYGGGGSGGGGRGGFPSGGGGGGGQQRAGDWKCPNPTCENMNFSWRNECNQCKAPKPDGPGGGPGGSHMGGNYGDDRRGGRGGAIAGKPIPNPLLGLDSTGAPGSAGSAAGSGACPVPLQLPPLERLTLDDKKPLNTLISATGLWMSRTGTIHKIKHHEVSRSKIYIEMACGDHLVVNNSRSSRTARALRHHKYRKTCKRCRVSDEDLNKFLTKANEDQTSVKVKVVSAPTRTKKAMPKSVARAPKPLENTEAAQAQPSGSKFSPAIPVSTQESVSVPASVSTSISSISTGATASALVKGNTNPITSMSAPVQASAPALTKSQTDRLEVLLNPKDEISLNSGKPFRELESELLSRRKKDLQQIYAEERENYLGKLEREITRFFVDRGFLEIKSPILIPLEYIERMGIDNDTELSKQIFRVDKNFCLRPMLAPNLANYLRKLDRALPDPIKIFEIGPCYRKESDGKEHLEEFTMLNFCQMGSGCTRENLESIITDFLNHLGIDFKIVGDSCMVFGDTLDVMHGDLELSSAVVGPIPLDREWGIDKPWIGAGFGLERLLKVKHDFKNIKRAARSESYYNGISTNLASNDYTQQATQSYGAYPTQPGQGYSQQSSQPYGQQSYSGYSQSTDTSGYGQSSYSSYGQSQNTGYGTQSTPQGYGSTGGYGSSQSSQSSYGQQSSYPGYGQQPAPSSTSGSYGSSSQSSSYGQPQSGSYSQQPSYGGQQQSYGQQQSYNPPQGYGQQNQYNSSSGGGGGGGGGGNYGQDQSSMSSGGGSGGGYGNQDQSGGGGSGGYGQQDRGGRGRGGSGGGGGGGGGGYNRSSGGYEPRGRGGGRGGRGGMGGSDRGGFNKFGGPRDQGSRHDSEQDNSDNNTIFVQGLGENVTIESVADYFKQIGIIKTNKKTGQPMINLYTDRETGKLKGEATVSFDDPPSAKAAIDWFDGKEFSGNPIKVSFATRRADFNRGGGNGRGGRGRGGPMGRGGYGGGGSGGGGRGGFPSGGGGGGGQQRAGDWKCPNPTCENMNFSWRNECNQCKAPKPDGPGGGPGGSHMGGNYGDDRRGGRGGDKKPLNTLISATGLWMSRTGTIHKIKHHEVSRSKIYIEMACGDHLVVNNSRSSRTARALRHHKYRKTCKRCRVSDEDLNKFLTKANEDQTSVKVKVVSAPTRTKKAMPKSVARAPKPLENTEAAQAQPSGSKFSPAIPVSTQESVSVPASVSTSISSISTGATASALVKGNTNPITSMSAPVQASAPALTKSQTDRLEVLLNPKDEISLNSGKPFRELESELLSRRKKDLQQIYAEERENYLGKLEREITRFFVDRGFLEIKSPILIPLEYIERMGIDNDTELSKQIFRVDKNFCLRPMLAPNLANYLRKLDRALPDPIKIFEIGPCYRKESDGKEHLEEFTMLNFCQMGSGCTRENLESIITDFLNHLGIDFKIVGDSCMVFGDTLDVMHGDLELSSAVVGPIPLDREWGIDKPWIGAGFGLERLLKVKHDFKNIKRAARSESYYNGISTNL

SEQ ID NO: 489 - DNA, 6891 bp, Artificial Sequence
  Description of Artificial Sequence: Synthetic polynucleotide
  TOM20::EWSR1::4xlambdaN22::PylRS(AA)::FUS::PylRS(AA)
atggtgggtcggaacagcgccatcgccgccggtgtatgcggggcccttttcattgggtactgcatctacttcgaccgcaaaagacgaagtgaccccaacttcaagaacaggcttcgagaacgaagaaagaaacagaagcttgccaaggagagagctgggctttccaagttacctgaccttaaagatgctgaagctgttcagaagttcttcatggcgtccacggattacagtacctatagccaagctgcagcgcagcagggctacagtgcttacaccgcccagcccactcaaggatatgcacagaccacccaggcatatgggcaacaaagctatggaacctatggacagcccactgatgtcagctatacccaggctcagaccactgcaacctatgggcagaccgcctatgcaacttcttatggacagcctcccactggttatactactccaactgccccccaggcatacagccagcctgtccaggggtatggcactggtgcttatgataccaccactgctacagtcaccaccacccaggcctcctatgcagctcagtctgcatatggcactcagcctgcttatccagcctatgggcagcagccagcagccactgcacctacaagaccgcaggatggaaacaagcccactgagactagtcaacctcaatctagcacagggggttacaaccagcccagcctaggatatggacagagtaactacagttatccccaggtacctgggagctaccccatgcagccagtcactgcacctccatcctaccctcctaccagctattcctctacacagccgactagttatgatcagagcagttactctcagcagaacacctatgggcaaccgagcagctatggacagcagagtagctatggtcaacaaagcagctatgggcagcagcctcccactagttacccaccccaaactggatcctacagccaagctccaagtcaatatagccaacagagcagcagctacgggcagcagagttcattccgacaggaccaccccagtagcatgggtgtttatgggcaggagtctggaggattttccggaccaggagagaaccggagcatgagtggccctgataaccggggcaggggaagagggggatttgatcgtggaggcatgagcagaggtgggcggggaggaggacgcggtggaatgggcagcgctggagagcgaggtggcttcaataagcctggtggacccatggatgaaggaccagatcttgatctaggcccacctgtagatccagatgaagactctgacaacagtgcaatttatgtacaaggattaaatgacagtgtgactctagatgatctggcagacttctttaagcagtgtggggttgttaagatgaacaagagaactgggcaacccatgatccacatctacctggacaaggaaacaggaaagcccaaaggcgatgccacagtgtcctatgaagacccacctactgccaaggctgccgtggaatggtttgatgggaaagattttcaagggagcaaacttaaagtctcccttgctcggaagaagcctccaatgaacagtatgcggggtggtctgccaccccgtgagggcagaggcatgccaccaccactccgtggaggtccaggaggcccaggaggtcctgggggacccatgggtcgcatgggaggccgtggaggagatagaggaggcttccctccaagaggaccccggggttcccgagggaacccctctggaggaggaaacgtccagcaccgagctggagactggcagtgtcccaatccgggttgtggaaaccagaacttcgcctggagaacagagtgcaaccagtgtaaggccccaaagcctgaaggcttcctcccgccaccctttccgcccccgggtggtgatcgtggcagaggtggccctggtggcatgcggggaggaagaggtggcctcatggatcgtggtggtcccggtggaatgttcagaggtggccgtggtggagacagaggtggcttccgtggtggccggggcatggaccgaggtggctttggtggaggaagacgaggtggccctggggggccccctggacctttgatggaacaggcgatcgcaggagcaccaggaagtgctggttctgctgctggtagtggagagcagaagctgatctcagaggaggacctgctagccaccatggacgcacaaacacgacgacgtgagcgtcgcgctgagaaacaagctcaatggaaagctgcaaacccaccgctcgacggagccggagctggcgctggagctggagccggagctggcggtctagccaccatggacgcacaaacacgacgacgtgagcgtcgcgctgagaaacaagctcaatggaaagctgcaaacccaccgctcgacggagccggagctggcgctggagctggagccggagctggcggtctagccaccatggacgcacaaacacgacgacgtgagcgtcgcgctgagaaacaagctcaatggaaagctgcaaacccaccgctcgacggagccggagctggcgctggagctggagccggagctggcggtctagccaccatggacgcacaaacacgacgacgtgagcgtcgcgctgagaaacaagctcaatggaaagctgcaaacccaccgctcgggctaagccccgaccgcgttagagccgtatcccactggtcttccgcgtgcccggtgccgctgcagctgccgccgctggaacgcctgaccctggatgataaaaaaccgctgaataccctgatctctgctactggtctgtggatgagtcgtaccggaaccattcataaaatcaaacaccacgaggttagccgttcgaaaatctatattgagatggcgtgtggcgatcatctggttgtgaacaatagccgctcttctcgtacagcacgtgcactgcgtcaccacaaatatcgtaaaacctgtaaacgttgccgtgtgtccgatgaggatctgaacaaattcctgacaaaagccaatgaggaccaaacaagcgtgaaagtgaaagtcgttagcgctcctacccgtactaaaaaagcaatgccgaaatccgttgctcgtgcccctaaaccactggaaaacactgaagcagcacaggcacagccgtctggaagcaaattctctccggccattcctgtttctacccaggagtccgtttctgttccagcaagtgtgagcaccagcattagcagtattagcaccggtgccaccgctagcgccctggttaaaggcaataccaatccgattacaagcatgtctgccccggttcaagcatcagctccagcactgacaaaatcccaaaccgatcgtctggaggttctgctgaatccgaaagacgaaatcagcctgaattccggcaaaccgtttcgtgaactggagagcgaactgctgtcacgtcgtaaaaaagacctgcaacaaatctatgccgaagaacgtgagaactatctggggaaactggaacgtgaaatcacccgctttttcgtggatcgtggctttctggagatcaaatccccgattctgattcctctggagtatatcgagcgtatgggcatcgacaatgataccgaactgagcaaacaaattttccgtgtggataaaaacttctgtctgcgccctatgctggcaccaaatctgtataactatctgcgcaaactggaccgtgccctgcctgatcctatcaaaatcttcgagatcggcccgtgttatcgtaaagagtccgacggtaaagaacatctggaggagtttaccatgctggcctttgcccaaatgggttcaggttgtactcgtgagaacctggaaagcatcatcaccgattttctgaaccacctgggcattgacttcaaaattgtgggcgacagctgtatggtgtatggcgacaccctggatgtcatgcacggcgacctggaactgtctagtgccgttgttggaccaattccgctggaccgtgagtggggtatcgacaaaccgtggatcggagcaggattcggtctggaacgcctgctgaaagtgaaacacgacttcaaaaacatcaaacgtgccgcccgttctgaatcgtattataacgggatctctacgaacctggcctcaaacgattatacccaacaagcaacccaaagctatggggcctaccccacccagcccgggcagggctattcccagcagagcagtcagccctacggacagcagagttacagtggttatagccagtccacggacacttcaggatatggccagagcagctattcttcttatggccagagccagaacacaggctatggaactcagtcaactccccagggatatggctcgactggcggctatggcagtagccagagctcccaatcgtcttacgggcagcagtcctcctaccctggctatggccagcagccagctcccagcagcacctcgggaagttacggtagcagttctcagagcagcagctatgggcagccccagagtgggagctacagccagcagcctagctatggtggacagcagcaaagctatggacagcagcaaagctataatccccctcagggctatggacagcagaaccagtacaacagcagcagtggtggtggaggtggaggtggaggtggaggtaactatggccaagatcaatcctccatgagtagtggtggtggcagtggtggcggttatggcaatcaagaccagagtggtggaggtggcagcggtggctatggacagcaggaccgtggaggccgcggcaggggtggcagtggtggcggcggcggcggcggcggtggtggttacaaccgcagcagtggtggctatgaacccagaggtcgtggaggtggccgtggaggcagaggtggcatgggcggaagtgaccgtggtggcttcaataaatttggtggccctcgggaccaaggatcacgtcatgactccgaacaggataattcagacaacaacaccatctttgtgcaaggcctgggtgagaatgttacaattgagtctgtggctgattacttcaagcagattggtattattaagacaaacaagaaaacgggacagcccatgattaatttgtacacagacagggaaactggcaagctgaagggagaggcaacggtctcttttgatgacccaccttcagctaaagcagctattgactggtttgatggtaaagaattctccggaaatcctatcaaggtctcatttgctactcgccgggcagactttaatcggggtggtggcaatggtcgtggaggccgagggcgaggaggacccatgggccgtggaggctatggaggtggtggcagtggtggtggtggccgaggaggatttcccagtggaggtggtggcggtggaggacagcagcgagctggtgactggaagtgtcctaatcccacctgtgagaatatgaacttctcttggaggaatgaatgcaaccagtgtaaggcccctaaaccagatggcccaggagggggaccaggtggctctcacatggggggtaactacggggatgatcgtcgtggtggcagaggaggcgataaaaaaccgctgaataccctgatctctgctactggtctgtggatgagtcgtaccggaaccattcataaaatcaaacaccacgaggttagccgttcgaaaatctatattgagatggcgtgtggcgatcatctggttgtgaacaatagccgctcttctcgtacagcacgtgcactgcgtcaccacaaatatcgtaaaacctgtaaacgttgccgtgtgtccgatgaggatctgaacaaattcctgacaaaagccaatgaggaccaaacaagcgtgaaagtgaaagtcgttagcgctcctacccgtactaaaaaagcaatgccgaaatccgttgctcgtgcccctaaaccactggaaaacactgaagcagcacaggcacagccgtctggaagcaaattctctccggccattcctgtttctacccaggagtccgtttctgttccagcaagtgtgagcaccagcattagcagtattagcaccggtgccaccgctagcgccctggttaaaggcaataccaatccgattacaagcatgtctgccccggttcaagcatcagctccagcactgacaaaatcccaaaccgatcgtctggaggttctgctgaatccgaaagacgaaatcagcctgaattccggcaaaccgtttcgtgaactggagagcgaactgctgtcacgtcgtaaaaaagacctgcaacaaatctatgccgaagaacgtgagaactatctggggaaactggaacgtgaaatcacccgctttttcgtggatcgtggctttctggagatcaaatccccgattctgattcctctggagtatatcgagcgtatgggcatcgacaatgataccgaactgagcaaacaaattttccgtgtggataaaaacttctgtctgcgccctatgctggcaccaaatctgtataactatctgcgcaaactggaccgtgccctgcctgatcctatcaaaatcttcgagatcggcccgtgttatcgtaaagagtccgacggtaaagaacatctggaggagtttaccatgctggcctttgcccaaatgggttcaggttgtactcgtgagaacctggaaagcatcatcaccgattttctgaaccacctgggcattgacttcaaaattgtgggcgacagctgtatggtgtatggcgacaccctggatgtcatgcacggcgacctggaactgtctagtgccgttgttggaccaattccgctggaccgtgagtggggtatcgacaaaccgtggatcggagcaggattcggtctggaacgcctgctgaaagtgaaacacgacttcaaaaacatcaaacgtgccgcccgttctgaatcgtattataacgggatctctacgaacctgtaa

SEQ ID NO: 490 - protein, 2296 aa, Artificial Sequence
  Description of Artificial Sequence: Synthetic polypeptide
  TOM20::EWSR1::4xlambdaN22::PylRS(AA)::FUS::PylRS(AA)
MVGRNSAIAAGVCGALFIGYCIYFDRKRRSDPNFKNRLRERRKKQKLAKERAGLSKLPDLKDAEAVQKFFMASTDYSTYSQAAAQQGYSAYTAQPTQGYAQTTQAYGQQSYGTYGQPTDVSYTQAQTTATYGQTAYATSYGQPPTGYTTPTAPQAYSQPVQGYGTGAYDTTTATVTTTQASYAAQSAYGTQPAYPAYGQQPAATAPTRPQDGNKPTETSQPQSSTGGYNQPSLGYGQSNYSYPQVPGSYPMQPVTAPPSYPPTSYSSTQPTSYDQSSYSQQNTYGQPSSYGQQSSYGQQSSYGQQPPTSYPPQTGSYSQAPSQYSQQSSSYGQQSSFRQDHPSSMGVYGQESGGFSGPGENRSMSGPDNRGRGRGGFDRGGMSRGGRGGGRGGMGSAGERGGFNKPGGPMDEGPDLDLGPPVDPDEDSDNSAIYVQGLNDSVTLDDLADFFKQCGVVKMNKRTGQPMIHIYLDKETGKPKGDATVSYEDPPTAKAAVEWFDGKDFQGSKLKVSLARKKPPMNSMRGGLPPREGRGMPPPLRGGPGGPGGPGGPMGRMGGRGGDRGGFPPRGPRGSRGNPSGGGNVQHRAGDWQCPNPGCGNQNFAWRTECNQCKAPKPEGFLPPPFPPPGGDRGRGGPGGMRGGRGGLMDRGGPGGMFRGGRGGDRGGFRGGRGMDRGGFGGGRRGGPGGPPGPLMEQAIAGAPGSAGSAAGSGEQKLISEEDLLATMDAQTRRRERRAEKQAQWKAANPPLDGAGAGAGAGAGAGGLATMDAQTRRRERRAEKQAQWKAANPPLDGAGAGAGAGAGAGGLATMDAQTRRRERRAEKQAQWKAANPPLDGAGAGAGAGAGAGGLATMDAQTRRRERRAEKQAQWKAANPPLGLSPDRVRAVSHWSSACPVPLQLPPLERLTLDDKKPLNTLISATGLWMSRTGTIHKIKHHEVSRSKIYIEMACGDHLVVNNSRSSRTARALRHHKYRKTCKRCRVSDEDLNKFLTKANEDQTSVKVKVVSAPTRTKKAMPKSVARAPKPLENTEAAQAQPSGSKFSPAIPVSTQESVSVPASVSTSISSISTGATASALVKGNTNPITSMSAPVQASAPALTKSQTDRLEVLLNPKDEISLNSGKPFRELESELLSRRKKDLQQIYAEERENYLGKLEREITRFFVDRGFLEIKSPILIPLEYIERMGIDNDTELSKQIFRVDKNFCLRPMLAPNLYNYLRKLDRALPDPIKIFEIGPCYRKESDGKEHLEEFTMLAFAQMGSGCTRENLESIITDFLNHLGIDFKIVGDSCMVYGDTLDVMHGDLELSSAVVGPIPLDREWGIDKPWIGAGFGLERLLKVKHDFKNIKRAARSESYYNGISTNLASNDYTQQATQSYGAYPTQPGQGYSQQSSQPYGQQSYSGYSQSTDTSGYGQSSYSSYGQSQNTGYGTQSTPQGYGSTGGYGSSQSSQSSYGQQSSYPGYGQQPAPSSTSGSYGSSSQSSSYGQPQSGSYSQQPSYGGQQQSYGQQQSYNPPQGYGQQNQYNSSSGGGGGGGGGGNYGQDQSSMSSGGGSGGGYGNQDQSGGGGSGGYGQQDRGGRGRGGSGGGGGGGGGGYNRSSGGYEPRGRGGGRGGRGGMGGSDRGGFNKFGGPRDQGSRHDSEQDNSDNNTIFVQGLGENVTIESVADYFKQIGIIKTNKKTGQPMINLYTDRETGKLKGEATVSFDDPPSAKAAIDWFDGKEFSGNPIKVSFATRRADFNRGGGNGRGGRGRGGPMGRGGYGGGGSGGGGRGGFPSGGGGGGGQQRAGDWKCPNPTCENMNFSWRNECNQCKAPKPDGPGGGPGGSHMGGNYGDDRRGGRGGDKKPLNTLISATGLWMSRTGTIHKIKHHEVSRSKIYIEMACGDHLVVNNSRSSRTARALRHHKYRKTCKRCRVSDEDLNKFLTKANEDQTSVKVKVVSAPTRTKKAMPKSVARAPKPLENTEAAQAQPSGSKFSPAIPVSTQESVSVPASVSTSISSISTGATASALVKGNTNPITSMSAPVQASAPALTKSQTDRLEVLLNPKDEISLNSGKPFRELESELLSRRKKDLQQIYAEERENYLGKLEREITRFFVDRGFLEIKSPILIPLEYIERMGIDNDTELSKQIFRVDKNFCLRPMLAPNLYNYLRKLDRALPDPIKIFEIGPCYRKESDGKEHLEEFTMLAFAQMGSGCTRENLESIITDFLNHLGIDFKIVGDSCMVYGDTLDVMHGDLELSSAVVGPIPLDREWGIDKPWIGAGFGLERLLKVKHDFKNIKRAARSESYYNGISTNL

SEQ ID NO: 491 - DNA, 6597 bp, Artificial Sequence
  Description of Artificial Sequence: Synthetic polynucleotide
  LCK::EWSR1::MCP::PylRS(AA)::FUS::PylRS(AA)
atgggctgcgtgtgcagcagcaaccccgagggtaccgagctcatggcgtccacggattacagtacctatagccaagctgcagcgcagcagggctacagtgcttacaccgcccagcccactcaaggatatgcacagaccacccaggcatatgggcaacaaagctatggaacctatggacagcccactgatgtcagctatacccaggctcagaccactgcaacctatgggcagaccgcctatgcaacttcttatggacagcctcccactggttatactactccaactgccccccaggcatacagccagcctgtccaggggtatggcactggtgcttatgataccaccactgctacagtcaccaccacccaggcctcctatgcagctcagtctgcatatggcactcagcctgcttatccagcctatgggcagcagccagcagccactgcacctacaagaccgcaggatggaaacaagcccactgagactagtcaacctcaatctagcacagggggttacaaccagcccagcctaggatatggacagagtaactacagttatccccaggtacctgggagctaccccatgcagccagtcactgcacctccatcctaccctcctaccagctattcctctacacagccgactagttatgatcagagcagttactctcagcagaacacctatgggcaaccgagcagctatggacagcagagtagctatggtcaacaaagcagctatgggcagcagcctcccactagttacccaccccaaactggatcctacagccaagctccaagtcaatatagccaacagagcagcagctacgggcagcagagttcattccgacaggaccaccccagtagcatgggtgtttatgggcaggagtctggaggattttccggaccaggagagaaccggagcatgagtggccctgataaccggggcaggggaagagggggatttgatcgtggaggcatgagcagaggtgggcggggaggaggacgcggtggaatgggcagcgctggagagcgaggtggcttcaataagcctggtggacccatggatgaaggaccagatcttgatctaggcccacctgtagatccagatgaagactctgacaacagtgcaatttatgtacaaggattaaatgacagtgtgactctagatgatctggcagacttctttaagcagtgtggggttgttaagatgaacaagagaactgggcaacccatgatccacatctacctggacaaggaaacaggaaagcccaaaggcgatgccacagtgtcctatgaagacccacctactgccaaggctgccgtggaatggtttgatgggaaagattttcaagggagcaaacttaaagtctcccttgctcggaagaagcctccaatgaacagtatgcggggtggtctgccaccccgtgagggcagaggcatgccaccaccactccgtggaggtccaggaggcccaggaggtcctgggggacccatgggtcgcatgggaggccgtggaggagatagaggaggcttccctccaagaggaccccggggttcccgagggaacccctctggaggaggaaacgtccagcaccgagctggagactggcagtgtcccaatccgggttgtggaaaccagaacttcgcctggagaacagagtgcaaccagtgtaaggccccaaagcctgaaggcttcctcccgccaccctttccgcccccgggtggtgatcgtggcagaggtggccctggtggcatgcggggaggaagaggtggcctcatggatcgtggtggtcccggtggaatgttcagaggtggccgtggtggagacagaggtggcttccgtggtggccggggcatggaccgaggtggctttggtggaggaagacgaggtggccctggggggccccctggacctttgatggaacaggcgatcgcatatccctatgatgtgccggattatgctggagcaccaggaagtgctggttctgctgctggtagtggagcttctaactttactcagttcgttctcgtcgacaatggcggaactggcgacgtgactgtcgccccaagcaacttcgctaacgggatcgctgaatggatcagctctaactcgcgttcacaggcttacaaagtaacctgtagcgttcgtcagagctctgcgcagaatcgcaaatacaccatcaaagtcgaggtgcctaaaggcgcctggcgttcgtacttaaatatggaactaaccattccaattttcgccacgaattccgactgcgagcttattgttaaggcaatgcaaggtctcctaaaagatggaaacccgattccctcagcaatcgcagcaaactccggcatctacgggctaagccccgaccgcgttagagccgtatcccactggtcttccgcgtgcccggtgccgctgcagctgccgccgctggaacgcctgaccctggatgataaaaaaccgctgaataccctgatctctgctactggtctgtggatgagtcgtaccggaaccattcataaaatcaaacaccacgaggttagccgttcgaaaatctatattgagatggcgtgtggcgatcatctggttgtgaacaatagccgctcttctcgtacagcacgtgcactgcgtcaccacaaatatcgtaaaacctgtaaacgttgccgtgtgtccgatgaggatctgaacaaattcctgacaaaagccaatgaggaccaaacaagcgtgaaagtgaaagtcgttagcgctcctacccgtactaaaaaagcaatgccgaaatccgttgctcgtgcccctaaaccactggaaaacactgaagcagcacaggcacagccgtctggaagcaaattctctccggccattcctgtttctacccaggagtccgtttctgttccagcaagtgtgagcaccagcattagcagtattagcaccggtgccaccgctagcgccctggttaaaggcaataccaatccgattacaagcatgtctgccccggttcaagcatcagctccagcactgacaaaatcccaaaccgatcgtctggaggttctgctgaatccgaaagacgaaatcagcctgaattccggcaaaccgtttcgtgaactggagagcgaactgctgtcacgtcgtaaaaaagacctgcaacaaatctatgccgaagaacgtgagaactatctggggaaactggaacgtgaaatcacccgctttttcgtggatcgtggctttctggagatcaaatccccgattctgattcctctggagtatatcgagcgtatgggcatcgacaatgataccgaactgagcaaacaaattttccgtgtggataaaaacttctgtctgcgccctatgctggcaccaaatctgtataactatctgcgcaaactggaccgtgccctgcctgatcctatcaaaatcttcgagatcggcccgtgttatcgtaaagagtccgacggtaaagaacatctggaggagtttaccatgctggcctttgcccaaatgggttcaggttgtactcgtgagaacctggaaagcatcatcaccgattttctgaaccacctgggcattgacttcaaaattgtgggcgacagctgtatggtgtatggcgacaccctggatgtcatgcacggcgacctggaactgtctagtgccgttgttggaccaattccgctggaccgtgagtggggtatcgacaaaccgtggatcggagcaggattcggtctggaacgcctgctgaaagtgaaacacgacttcaaaaacatcaaacgtgccgcccgttctgaatcgtattataacgggatctctacgaacctggcctcaaacgattatacccaacaagcaacccaaagctatggggcctaccccacccagcccgggcagggctattcccagcagagcagtcagccctacggacagcagagttacagtggttatagccagtccacggacacttcaggatatggccagagcagctattcttcttatggccagagccagaacacaggctatggaactcagtcaactccccagggatatggctcgactggcggctatggcagtagccagagctcccaatcgtcttacgggcagcagtcctcctaccctggctatggccagcagccagctcccagcagcacctcgggaagttacggtagcagttctcagagcagcagctatgggcagccccagagtgggagctacagccagcagcctagctatggtggacagcagcaaagctatggacagcagcaaagctataatccccctcagggctatggacagcagaaccagtacaacagcagcagtggtggtggaggtggaggtggaggtggaggtaactatggccaagatcaatcctccatgagtagtggtggtggcagtggtggcggttatggcaatcaagaccagagtggtggaggtggcagcggtggctatggacagcaggaccgtggaggccgcggcaggggtggcagtggtggcggcggcggcggcggcggtggtggttacaaccgcagcagtggtggctatgaacccagaggtcgtggaggtggccgtggaggcagaggtggcatgggcggaagtgaccgtggtggcttcaataaatttggtggccctcgggaccaaggatcacgtcatgactccgaacaggataattcagacaacaacaccatctttgtgcaaggcctgggtgagaatgttacaattgagtctgtggctgattacttcaagcagattggtattattaagacaaacaagaaaacgggacagcccatgattaatttgtacacagacagggaaactggcaagctgaagggagaggcaacggtctcttttgatgacccaccttcagctaaagcagctattgactggtttgatggtaaagaattctccggaaatcctatcaaggtctcatttgctactcgccgggcagactttaatcggggtggtggcaatggtcgtggaggccgagggcgaggaggacccatgggccgtggaggctatggaggtggtggcagtggtggtggtggccgaggaggatttcccagtggaggtggtggcggtggaggacagcagcgagctggtgactggaagtgtcctaatcccacctgtgagaatatgaacttctcttggaggaatgaatgcaaccagtgtaaggcccctaaaccagatggcccaggagggggaccaggtggctctcacatggggggtaactacggggatgatcgtcgtggtggcagaggaggcgataaaaaaccgctgaataccctgatctctgctactggtctgtggatgagtcgtaccggaaccattcataaaatcaaacaccacgaggttagccgttcgaaaatctatattgagatggcgtgtggcgatcatctggttgtgaacaatagccgctcttctcgtacagcacgtgcactgcgtcaccacaaatatcgtaaaacctgtaaacgttgccgtgtgtccgatgaggatctgaacaaattcctgacaaaagccaatgaggaccaaacaagcgtgaaagtgaaagtcgttagcgctcctacccgtactaaaaaagcaatgccgaaatccgttgctcgtgcccctaaaccactggaaaacactgaagcagcacaggcacagccgtctggaagcaaattctctccggccattcctgtttctacccaggagtccgtttctgttccagcaagtgtgagcaccagcattagcagtattagcaccggtgccaccgctagcgccctggttaaaggcaataccaatccgattacaagcatgtctgccccggttcaagcatcagctccagcactgacaaaatcccaaaccgatcgtctggaggttctgctgaatccgaaagacgaaatcagcctgaattccggcaaaccgtttcgtgaactggagagcgaactgctgtcacgtcgtaaaaaagacctgcaacaaatctatgccgaagaacgtgagaactatctggggaaactggaacgtgaaatcacccgctttttcgtggatcgtggctttctggagatcaaatccccgattctgattcctctggagtatatcgagcgtatgggcatcgacaatgataccgaactgagcaaacaaattttccgtgtggataaaaacttctgtctgcgccctatgctggcaccaaatctgtataactatctgcgcaaactggaccgtgccctgcctgatcctatcaaaatcttcgagatcggcccgtgttatcgtaaagagtccgacggtaaagaacatctggaggagtttaccatgctggcctttgcccaaatgggttcaggttgtactcgtgagaacctggaaagcatcatcaccgattttctgaaccacctgggcattgacttcaaaattgtgggcgacagctgtatggtgtatggcgacaccctggatgtcatgcacggcgacctggaactgtctagtgccgttgttggaccaattccgctggaccgtgagtggggtatcgacaaaccgtggatcggagcaggattcggtctggaacgcctgctgaaagtgaaacacgacttcaaaaacatcaaacgtgccgcccgttctgaatcgtattataacgggatctctacgaacctgtaa

SEQ ID NO: 492 - protein, 2198 aa, Artificial Sequence
  Description of Artificial Sequence: Synthetic polypeptide
  LCK::EWSR1::MCP::PylRS(AA)::FUS::PylRS(AA)
MGCVCSSNPEGTELMASTDYSTYSQAAAQQGYSAYTAQPTQGYAQTTQAYGQQSYGTYGQPTDVSYTQAQTTATYGQTAYATSYGQPPTGYTTPTAPQAYSQPVQGYGTGAYDTTTATVTTTQASYAAQSAYGTQPAYPAYGQQPAATAPTRPQDGNKPTETSQPQSSTGGYNQPSLGYGQSNYSYPQVPGSYPMQPVTAPPSYPPTSYSSTQPTSYDQSSYSQQNTYGQPSSYGQQSSYGQQSSYGQQPPTSYPPQTGSYSQAPSQYSQQSSSYGQQSSFRQDHPSSMGVYGQESGGFSGPGENRSMSGPDNRGRGRGGFDRGGMSRGGRGGGRGGMGSAGERGGFNKPGGPMDEGPDLDLGPPVDPDEDSDNSAIYVQGLNDSVTLDDLADFFKQCGVVKMNKRTGQPMIHIYLDKETGKPKGDATVSYEDPPTAKAAVEWFDGKDFQGSKLKVSLARKKPPMNSMRGGLPPREGRGMPPPLRGGPGGPGGPGGPMGRMGGRGGDRGGFPPRGPRGSRGNPSGGGNVQHRAGDWQCPNPGCGNQNFAWRTECNQCKAPKPEGFLPPPFPPPGGDRGRGGPGGMRGGRGGLMDRGGPGGMFRGGRGGDRGGFRGGRGMDRGGFGGGRRGGPGGPPGPLMEQAIAYPYDVPDYAGAPGSAGSAAGSGASNFTQFVLVDNGGTGDVTVAPSNFANGIAEWISSNSRSQAYKVTCSVRQSSAQNRKYTIKVEVPKGAWRSYLNMELTIPIFATNSDCELIVKAMQGLLKDGNPIPSAIAANSGIYGLSPDRVRAVSHWSSACPVPLQLPPLERLTLDDKKPLNTLISATGLWMSRTGTIHKIKHHEVSRSKIYIEMACGDHLVVNNSRSSRTARALRHHKYRKTCKRCRVSDEDLNKFLTKANEDQTSVKVKVVSAPTRTKKAMPKSVARAPKPLENTEAAQAQPSGSKFSPAIPVSTQESVSVPASVSTSISSISTGATASALVKGNTNPITSMSAPVQASAPALTKSQTDRLEVLLNPKDEISLNSGKPFRELESELLSRRKKDLQQIYAEERENYLGKLEREITRFFVDRGFLEIKSPILIPLEYIERMGIDNDTELSKQIFRVDKNFCLRPMLAPNLYNYLRKLDRALPDPIKIFEIGPCYRKESDGKEHLEEFTMLAFAQMGSGCTRENLESIITDFLNHLGIDFKIVGDSCMVYGDTLDVMHGDLELSSAVVGPIPLDREWGIDKPWIGAGFGLERLLKVKHDFKNIKRAARSESYYNGISTNLASNDYTQQATQSYGAYPTQPGQGYSQQSSQPYGQQSYSGYSQSTDTSGYGQSSYSSYGQSQNTGYGTQSTPQGYGSTGGYGSSQSSQSSYGQQSSYPGYGQQPAPSSTSGSYGSSSQSSSYGQPQSGSYSQQPSYGGQQQSYGQQQSYNPPQGYGQQNQYNSSSGGGGGGGGGGNYGQDQSSMSSGGGSGGGYGNQDQSGGGGSGGYGQQDRGGRGRGGSGGGGGGGGGGYNRSSGGYEPRGRGGGRGGRGGMGGSDRGGFNKFGGPRDQGSRHDSEQDNSDNNTIFVQGLGENVTIESVADYFKQIGIIKTNKKTGQPMINLYTDRETGKLKGEATVSFDDPPSAKAAIDWFDGKEFSGNPIKVSFATRRADFNRGGGNGRGGRGRGGPMGRGGYGGGGSGGGGRGGFPSGGGGGGGQQRAGDWKCPNPTCENMNFSWRNECNQCKAPKPDGPGGGPGGSHMGGNYGDDRRGGRGGDKKPLNTLISATGLWMSRTGTIHKIKHHEVSRSKIYIEMACGDHLVVNNSRSSRTARALRHHKYRKTCKRCRVSDEDLNKFLTKANEDQTSVKVKVVSAPTRTKKAMPKSVARAPKPLENTEAAQAQPSGSKFSPAIPVSTQESVSVPASVSTSISSISTGATASALVKGNTNPITSMSAPVQASAPALTKSQTDRLEVLLNPKDEISLNSGKPFRELESELLSRRKKDLQQIYAEERENYLGKLEREITRFFVDRGFLEIKSPILIPLEYIERMGIDNDTELSKQIFRVDKNFCLRPMLAPNLYNYLRKLDRALPDPIKIFEIGPCYRKESDGKEHLEEFTMLAFAQMGSGCTRENLESIITDFLNHLGIDFKIVGDSCMVYGDTLDVMHGDLELSSAVVGPIPLDREWGIDKPWIGAGFGLERLLKVKHDFKNIKRAARSESYYNGISTNL

SEQ ID NO: 493 - DNA, 4245 bp, Artificial Sequence
  Description of Artificial Sequence: Synthetic polynucleotide
  LCK::PylRS(AA)::FUS::PylRS(AA)
atgggctgcgtgtgcagcagcaaccccgagggtaccgagctcgcgtgcccggtgccgctgcagctgccgccgctggaacgcctgaccctggatgataaaaaaccgctgaataccctgatctctgctactggtctgtggatgagtcgtaccggaaccattcataaaatcaaacaccacgaggttagccgttcgaaaatctatattgagatggcgtgtggcgatcatctggttgtgaacaatagccgctcttctcgtacagcacgtgcactgcgtcaccacaaatatcgtaaaacctgtaaacgttgccgtgtgtccgatgaggatctgaacaaattcctgacaaaagccaatgaggaccaaacaagcgtgaaagtgaaagtcgttagcgctcctacccgtactaaaaaagcaatgccgaaatccgttgctcgtgcccctaaaccactggaaaacactgaagcagcacaggcacagccgtctggaagcaaattctctccggccattcctgtttctacccaggagtccgtttctgttccagcaagtgtgagcaccagcattagcagtattagcaccggtgccaccgctagcgccctggttaaaggcaataccaatccgattacaagcatgtctgccccggttcaagcatcagctccagcactgacaaaatcccaaaccgatcgtctggaggttctgctgaatccgaaagacgaaatcagcctgaattccggcaaaccgtttcgtgaactggagagcgaactgctgtcacgtcgtaaaaaagacctgcaacaaatctatgccgaagaacgtgagaactatctggggaaactggaacgtgaaatcacccgctttttcgtggatcgtggctttctggagatcaaatccccgattctgattcctctggagtatatcgagcgtatgggcatcgacaatgataccgaactgagcaaacaaattttccgtgtggataaaaacttctgtctgcgccctatgctggcaccaaatctgtataactatctgcgcaaactggaccgtgccctgcctgatcctatcaaaatcttcgagatcggcccgtgttatcgtaaagagtccgacggtaaagaacatctggaggagtttaccatgctggcctttgcccaaatgggttcaggttgtactcgtgagaacctggaaagcatcatcaccgattttctgaaccacctgggcattgacttcaaaattgtgggcgacagctgtatggtgtatggcgacaccctggatgtcatgcacggcgacctggaactgtctagtgccgttgttggaccaattccgctggaccgtgagtggggtatcgacaaaccgtggatcggagcaggattcggtctggaacgcctgctgaaagtgaaacacgacttcaaaaacatcaaacgtgccgcccgttctgaatcgtattataacgggatctctacgaacctggcctcaaacgattatacccaacaagcaacccaaagctatggggcctaccccacccagcccgggcagggctattcccagcagagcagtcagccctacggacagcagagttacagtggttatagccagtccacggacacttcaggatatggccagagcagctattcttcttatggccagagccagaacacaggctatggaactcagtcaactccccagggatatggctcgactggcggctatggcagtagccagagctcccaatcgtcttacgggcagcagtcctcctaccctggctatggccagcagccagctcccagcagcacctcgggaagttacggtagcagttctcagagcagcagctatgggcagccccagagtgggagctacagccagcagcctagctatggtggacagcagcaaagctatggacagcagcaaagctataatccccctcagggctatggacagcagaaccagtacaacagcagcagtggtggtggaggtggaggtggaggtggaggtaactatggccaagatcaatcctccatgagtagtggtggtggcagtggtggcggttatggcaatcaagaccagagtggtggaggtggcagcggtggctatggacagcaggaccgtggaggccgcggcaggggtggcagtggtggcggcggcggcggcggcggtggtggttacaaccgcagcagtggtggctatgaacccagaggtcgtggaggtggccgtggaggcagaggtggcatgggcggaagtgaccgtggtggcttcaataaatttggtggccctcgggaccaaggatcacgtcatgactccgaacaggataattcagacaacaacaccatctttgtgcaaggcctgggtgagaatgttacaattgagtctgtggctgattacttcaagcagattggtattattaagacaaacaagaaaacgggacagcccatgattaatttgtacacagacagggaaactggcaagctgaagggagaggcaacggtctcttttgatgacccaccttcagctaaagcagctattgactggtttgatggtaaagaattctccggaaatcctatcaaggtctcatttgctactcgccgggcagactttaatcggggtggtggcaatggtcgtggaggccgagggcgaggaggacccatgggccgtggaggctatggaggtggtggcagtggtggtggtggccgaggaggatttcccagtggaggtggtggcggtggaggacagcagcgagctggtgactggaagtgtcctaatcccacctgtgagaatatgaacttctcttggaggaatgaatgcaaccagtgtaaggcccctaaaccagatggcccaggagggggaccaggtggctctcacatggggggtaactacggggatgatcgtcgtggtggcagaggaggcgataaaaaaccgctgaataccctgatctctgctactggtctgtggatgagtcgtaccggaaccattcataaaatcaaacaccacgaggttagccgttcgaaaatctatattgagatggcgtgtggcgatcatctggttgtgaacaatagccgctcttctcgtacagcacgtgcactgcgtcaccacaaatatcgtaaaacctgtaaacgttgccgtgtgtccgatgaggatctgaacaaattcctgacaaaagccaatgaggaccaaacaagcgtgaaagtgaaagtcgttagcgctcctacccgtactaaaaaagcaatgccgaaatccgttgctcgtgcccctaaaccactggaaaacactgaagcagcacaggcacagccgtctggaagcaaattctctccggccattcctgtttctacccaggagtccgtttctgttccagcaagtgtgagcaccagcattagcagtattagcaccggtgccaccgctagcgccctggttaaaggcaataccaatccgattacaagcatgtctgccccggttcaagcatcagctccagcactgacaaaatcccaaaccgatcgtctggaggttctgctgaatccgaaagacgaaatcagcctgaattccggcaaaccgtttcgtgaactggagagcgaactgctgtcacgtcgtaaaaaagacctgcaacaaatctatgccgaagaacgtgagaactatctggggaaactggaacgtgaaatcacccgctttttcgtggatcgtggctttctggagatcaaatccccgattctgattcctctggagtatatcgagcgtatgggcatcgacaatgataccgaactgagcaaacaaattttccgtgtggataaaaacttctgtctgcgccctatgctggcaccaaatctgtataactatctgcgcaaactggaccgtgccctgcctgatcctatcaaaatcttcgagatcggcccgtgttatcgtaaagagtccgacggtaaagaacatctggaggagtttaccatgctggcctttgcccaaatgggttcaggttgtactcgtgagaacctggaaagcatcatcaccgattttctgaaccacctgggcattgacttcaaaattgtgggcgacagctgtatggtgtatggcgacaccctggatgtcatgcacggcgacctggaactgtctagtgccgttgttggaccaattccgctggaccgtgagtggggtatcgacaaaccgtggatcggagcaggattcggtctggaacgcctgctgaaagtgaaacacgacttcaaaaacatcaaacgtgccgcccgttctgaatcgtattataacgggatctctacgaacctgtaa

SEQ ID NO: 494 - protein, 1414 aa, Artificial Sequence
  Description of Artificial Sequence: Synthetic polypeptide
  LCK::PylRS(AA)::FUS::PylRS(AA)
MGCVCSSNPEGTELACPVPLQLPPLERLTLDDKKPLNTLISATGLWMSRTGTIHKIKHHEVSRSKIYIEMACGDHLVVNNSRSSRTARALRHHKYRKTCKRCRVSDEDLNKFLTKANEDQTSVKVKVVSAPTRTKKAMPKSVARAPKPLENTEAAQAQPSGSKFSPAIPVSTQESVSVPASVSTSISSISTGATASALVKGNTNPITSMSAPVQASAPALTKSQTDRLEVLLNPKDEISLNSGKPFRELESELLSRRKKDLQQIYAEERENYLGKLEREITRFFVDRGFLEIKSPILIPLEYIERMGIDNDTELSKQIFRVDKNFCLRPMLAPNLYNYLRKLDRALPDPIKIFEIGPCYRKESDGKEHLEEFTMLAFAQMGSGCTRENLESIITDFLNHLGIDFKIVGDSCMVYGDTLDVMHGDLELSSAVVGPIPLDREWGIDKPWIGAGFGLERLLKVKHDFKNIKRAARSESYYNGISTNLASNDYTQQATQSYGAYPTQPGQGYSQQSSQPYGQQSYSGYSQSTDTSGYGQSSYSSYGQSQNTGYGTQSTPQGYGSTGGYGSSQSSQSSYGQQSSYPGYGQQPAPSSTSGSYGSSSQSSSYGQPQSGSYSQQPSYGGQQQSYGQQQSYNPPQGYGQQNQYNSSSGGGGGGGGGGNYGQDQSSMSSGGGSGGGYGNQDQSGGGGSGGYGQQDRGGRGRGGSGGGGGGGGGGYNRSSGGYEPRGRGGGRGGRGGMGGSDRGGFNKFGGPRDQGSRHDSEQDNSDNNTIFVQGLGENVTIESVADYFKQIGIIKTNKKTGQPMINLYTDRETGKLKGEATVSFDDPPSAKAAIDWFDGKEFSGNPIKVSFATRRADFNRGGGNGRGGRGRGGPMGRGGYGGGGSGGGGRGGFPSGGGGGGGQQRAGDWKCPNPTCENMNFSWRNECNQCKAPKPDGPGGGPGGSHMGGNYGDDRRGGRGGDKKPLNTLISATGLWMSRTGTIHKIKHHEVSRSKIYIEMACGDHLVVNNSRSSRTARALRHHKYRKTCKRCRVSDEDLNKFLTKANEDQTSVKVKVVSAPTRTKKAMPKSVARAPKPLENTEAAQAQPSGSKFSPAIPVSTQESVSVPASVSTSISSISTGATASALVKGNTNPITSMSAPVQASAPALTKSQTDRLEVLLNPKDEISLNSGKPFRELESELLSRRKKDLQQIYAEERENYLGKLEREITRFFVDRGFLEIKSPILIPLEYIERMGIDNDTELSKQIFRVDKNFCLRPMLAPNLYNYLRKLDRALPDPIKIFEIGPCYRKESDGKEHLEEFTMLAFAQMGSGCTRENLESIITDFLNHLGIDFKIVGDSCMVYGDTLDVMHGDLELSSAVVGPIPLDREWGIDKPWIGAGFGLERLLKVKHDFKNIKRAARSESYYNGISTNL

SEQ ID NO: 495 - DNA, 4698 bp, Artificial Sequence
  Description of Artificial Sequence: Synthetic polynucleotide
  LCK::PylRS(AF)::EWSR1::PylRS(AF)
atgggctgcgtgtgcagcagcaaccccgagggtaccgagctcgcgtgcccggtgccgctgcagctgccgccgctggaacgcctgaccctggatgataaaaaaccgctgaataccctgatctctgctactggtctgtggatgagtcgtaccggaaccattcataaaatcaaacaccacgaggttagccgttcgaaaatctatattgagatggcgtgtggcgatcatctggttgtgaacaatagccgctcttctcgtacagcacgtgcactgcgtcaccacaaatatcgtaaaacctgtaaacgttgccgtgtgtccgatgaggatctgaacaaattcctgacaaaagccaatgaggaccaaacaagcgtgaaagtgaaagtcgttagcgctcctacccgtactaaaaaagcaatgccgaaatccgttgctcgtgcccctaaaccactggaaaacactgaagcagcacaggcacagccgtctggaagcaaattctctccggccattcctgtttctacccaggagtccgtttctgttccagcaagtgtgagcaccagcattagcagtattagcaccggtgccaccgctagcgccctggttaaaggcaataccaatccgattacaagcatgtctgccccggttcaagcatcagctccagcactgacaaaatcccaaaccgatcgtctggaggttctgctgaatccgaaagacgaaatcagcctgaattccggcaaaccgtttcgtgaactggagagcgaactgctgtcacgtcgtaaaaaagacctgcaacaaatctatgccgaagaacgtgagaactatctggggaaactggaacgtgaaatcacccgctttttcgtggatcgtggctttctggagatcaaatccccgattctgattcctctggagtatatcgagcgtatgggcatcgacaatgataccgaactgagcaaacaaattttccgtgtggataaaaacttctgtctgcgccctatgctagcaccaaatctggctaactatctgcgcaaactggaccgtgccctgcctgatcctatcaaaatcttcgagatcggcccgtgttatcgtaaagagtccgacggtaaagaacatctggaggagtttaccatgctgaacttttgccaaatgggttcaggttgtactcgtgagaacctggaaagcatcatcaccgattttctgaaccacctgggcattgacttcaaaattgtgggcgacagctgtatggtgtttggcgacaccctggatgtcatgcacggcgacctggaactgtctagtgccgttgtgggcccaatcccgctggatcgtgagtggggtatcgacaaaccttggatcggtgcgggttttggtctggagcgtctgctgaaagtaaaacacgacttcaagaacatcaaacgtgctgcacgttccgagtcctattacaatggtatttctactaacctgatggcgtccacggattacagtacctatagccaagctgcagcgcagcagggctacagtgcttacaccgcccagcccactcaaggatatgcacagaccacccaggcatatgggcaacaaagctatggaacctatggacagcccactgatgtcagctatacccaggctcagaccactgcaacctatgggcagaccgcctatgcaacttcttatggacagcctcccactggttatactactccaactgccccccaggcatacagccagcctgtccaggggtatggcactggtgcttatgataccaccactgctacagtcaccaccacccaggcctcctatgcagctcagtctgcatatggcactcagcctgcttatccagcctatgggcagcagccagcagccactgcacctacaagaccgcaggatggaaacaagcccactgagactagtcaacctcaatctagcacagggggttacaaccagcccagcctaggatatggacagagtaactacagttatccccaggtacctgggagctaccccatgcagccagtcactgcacctccatcctaccctcctaccagctattcctctacacagccgactagttatgatcagagcagttactctcagcagaacacctatgggcaaccgagcagctatggacagcagagtagctatggtcaacaaagcagctatgggcagcagcctcccactagttacccaccccaaactggatcctacagccaagctccaagtcaatatagccaacagagcagcagctacgggcagcagagttcattccgacaggaccaccccagtagcatgggtgtttatgggcaggagtctggaggattttccggaccaggagagaaccggagcatgagtggccctgataaccggggcaggggaagagggggatttgatcgtggaggcatgagcagaggtgggcggggaggaggacgcggtggaatgggcagcgctggagagcgaggtggcttcaataagcctggtggacccatggatgaaggaccagatcttgatctaggcccacctgtagatccagatgaagactctgacaacagtgcaatttatgtacaaggattaaatgacagtgtgactctagatgatctggcagacttctttaagcagtgtggggttgttaagatgaacaagagaactgggcaacccatgatccacatctacctggacaaggaaacaggaaagcccaaaggcgatgccacagtgtcctatgaagacccacctactgccaaggctgccgtggaatggtttgatgggaaagattttcaagggagcaaacttaaagtctcccttgctcggaagaagcctccaatgaacagtatgcggggtggtctgccaccccgtgagggcagaggcatgccaccaccactccgtggaggtccaggaggcccaggaggtcctgggggacccatgggtcgcatgggaggccgtggaggagatagaggaggcttccctccaagaggaccccggggttcccgagggaacccctctggaggaggaaacgtccagcaccgagctggagactggcagtgtcccaatccgggttgtggaaaccagaacttcgcctggagaacagagtgcaaccagtgtaaggccccaaagcctgaaggcttcctcccgccaccctttccgcccccgggtggtgatcgtggcagaggtggccctggtggcatgcggggaggaagaggtggcctcatggatcgtggtggtcccggtggaatgttcagaggtggccgtggtggagacagaggtggcttccgtggtggccggggcatggaccgaggtggctttggtggaggaagacgaggtggccctggggggccccctggacctttgatggaacaggataaaaaaccgctgaataccctgatctctgctactggtctgtggatgagtcgtaccggaaccattcataaaatcaaacaccacgaggttagccgttcgaaaatctatattgagatggcgtgtggcgatcatctggttgtgaacaatagccgctcttctcgtacagcacgtgcactgcgtcaccacaaatatcgtaaaacctgtaaacgttgccgtgtgtccgatgaggatctgaacaaattcctgacaaaagccaatgaggaccaaacaagcgtgaaagtgaaagtcgttagcgctcctacccgtactaaaaaagcaatgccgaaatccgttgctcgtgcccctaaaccactggaaaacactgaagcagcacaggcacagccgtctggaagcaaattctctccggccattcctgtttctacccaggagtccgtttctgttccagcaagtgtgagcaccagcattagcagtattagcaccggtgccaccgctagcgccctggttaaaggcaataccaatccgattacaagcatgtctgccccggttcaagcatcagctccagcactgacaaaatcccaaaccgatcgtctggaggttctgctgaatccgaaagacgaaatcagcctgaattccggcaaaccgtttcgtgaactggagagcgaactgctgtcacgtcgtaaaaaagacctgcaacaaatctatgccgaagaacgtgagaactatctggggaaactggaacgtgaaatcacccgctttttcgtggatcgtggctttctggagatcaaatccccgattctgattcctctggagtatatcgagcgtatgggcatcgacaatgataccgaactgagcaaacaaattttccgtgtggataaaaacttctgtctgcgccctatgctagcaccaaatctggctaactatctgcgcaaactggaccgtgccctgcctgatcctatcaaaatcttcgagatcggcccgtgttatcgtaaagagtccgacggtaaagaacatctggaggagtttaccatgctgaacttttgccaaatgggttcaggttgtactcgtgagaacctggaaagcatcatcaccgattttctgaaccacctgggcattgacttcaaaattgtgggcgacagctgtatggtgtttggcgacaccctggatgtcatgcacggcgacctggaactgtctagtgccgttgtgggcccaatcccgctggatcgtgagtggggtatcgacaaaccttggatcggtgcgggttttggtctggagcgtctgctgaaagtaaaacacgacttcaagaacatcaaacgtgctgcacgttccgagtcctattacaatggtatttctactaacctgtaa

SEQ ID NO: 496 - protein, 1565 aa, Artificial Sequence
  Description of Artificial Sequence: Synthetic polypeptide
  LCK::PylRS(AF)::EWSR1::PylRS(AF)
MGCVCSSNPEGTELACPVPLQLPPLERLTLDDKKPLNTLISATGLWMSRTGTIHKIKHHEVSRSKIYIEMACGDHLVVNNSRSSRTARALRHHKYRKTCKRCRVSDEDLNKFLTKANEDQTSVKVKVVSAPTRTKKAMPKSVARAPKPLENTEAAQAQPSGSKFSPAIPVSTQESVSVPASVSTSISSISTGATASALVKGNTNPITSMSAPVQASAPALTKSQTDRLEVLLNPKDEISLNSGKPFRELESELLSRRKKDLQQIYAEERENYLGKLEREITRFFVDRGFLEIKSPILIPLEYIERMGIDNDTELSKQIFRVDKNFCLRPMLAPNLANYLRKLDRALPDPIKIFEIGPCYRKESDGKEHLEEFTMLNFCQMGSGCTRENLESIITDFLNHLGIDFKIVGDSCMVFGDTLDVMHGDLELSSAVVGPIPLDREWGIDKPWIGAGFGLERLLKVKHDFKNIKRAARSESYYNGISTNLMASTDYSTYSQAAAQQGYSAYTAQPTQGYAQTTQAYGQQSYGTYGQPTDVSYTQAQTTATYGQTAYATSYGQPPTGYTTPTAPQAYSQPVQGYGTGAYDTTTATVTTTQASYAAQSAYGTQPAYPAYGQQPAATAPTRPQDGNKPTETSQPQSSTGGYNQPSLGYGQSNYSYPQVPGSYPMQPVTAPPSYPPTSYSSTQPTSYDQSSYSQQNTYGQPSSYGQQSSYGQQSSYGQQPPTSYPPQTGSYSQAPSQYSQQSSSYGQQSSFRQDHPSSMGVYGQESGGFSGPGENRSMSGPDNRGRGRGGFDRGGMSRGGRGGGRGGMGSAGERGGFNKPGGPMDEGPDLDLGPPVDPDEDSDNSAIYVQGLNDSVTLDDLADFFKQCGVVKMNKRTGQPMIHIYLDKETGKPKGDATVSYEDPPTAKAAVEWFDGKDFQGSKLKVSLARKKPPMNSMRGGLPPREGRGMPPPLRGGPGGPGGPGGPMGRMGGRGGDRGGFPPRGPRGSRGNPSGGGNVQHRAGDWQCPNPGCGNQNFAWRTECNQCKAPKPEGFLPPPFPPPGGDRGRGGPGGMRGGRGGLMDRGGPGGMFRGGRGGDRGGFRGGRGMDRGGFGGGRRGGPGGPPGPLMEQDKKPLNTLISATGLWMSRTGTIHKIKHHEVSRSKIYIEMACGDHLVVNNSRSSRTARALRHHKYRKTCKRCRVSDEDLNKFLTKANEDQTSVKVKVVSAPTRTKKAMPKSVARAPKPLENTEAAQAQPSGSKFSPAIPVSTQESVSVPASVSTSISSISTGATASALVKGNTNPITSMSAPVQASAPALTKSQTDRLEVLLNPKDEISLNSGKPFRELESELLSRRKKDLQQIYAEERENYLGKLEREITRFFVDRGFLEIKSPILIPLEYIERMGIDNDTELSKQIFRVDKNFCLRPMLAPNLANYLRKLDRALPDPIKIFEIGPCYRKESDGKEHLEEFTMLNFCQMGSGCTRENLESIITDFLNHLGIDFKIVGDSCMVFGDTLDVMHGDLELSSAVVGPIPLDREWGIDKPWIGAGFGLERLLKVKHDFKNIKRAARSESYYNGISTNL

SEQ ID NO: 497 - DNA, 6792 bp, Artificial Sequence
  Description of Artificial Sequence: Synthetic polynucleotide
  TOM20::FUS::MCP::PylRS(AF)::EWSR1::PylRS(AF)
atggtgggtcggaacagcgccatcgccgccggtgtatgcggggcccttttcattgggtactgcatctacttcgaccgcaaaagacgaagtgaccccaacttcaagaacaggcttcgagaacgaagaaagaaacagaagcttgccaaggagagagctgggctttccaagttacctgaccttaaagatgctgaagctgttcagaaattcttcatggcctcaaacgattatacccaacaagcaacccaaagctatggggcctaccccacccagcccgggcagggctattcccagcagagcagtcagccctacggacagcagagttacagtggttatagccagtccacggacacttcaggatatggccagagcagctattcttcttatggccagagccagaacacaggctatggaactcagtcaactccccagggatatggctcgactggcggctatggcagtagccagagctcccaatcgtcttacgggcagcagtcctcctaccctggctatggccagcagccagctcccagcagcacctcgggaagttacggtagcagttctcagagcagcagctatgggcagccccagagtgggagctacagccagcagcctagctatggtggacagcagcaaagctatggacagcagcaaagctataatccccctcagggctatggacagcagaaccagtacaacagcagcagtggtggtggaggtggaggtggaggtggaggtaactatggccaagatcaatcctccatgagtagtggtggtggcagtggtggcggttatggcaatcaagaccagagtggtggaggtggcagcggtggctatggacagcaggaccgtggaggccgcggcaggggtggcagtggtggcggcggcggcggcggcggtggtggttacaaccgcagcagtggtggctatgaacccagaggtcgtggaggtggccgtggaggcagaggtggcatgggcggaagtgaccgtggtggcttcaataaatttggtggccctcgggaccaaggatcacgtcatgactccgaacaggataattcagacaacaacaccatctttgtgcaaggcctgggtgagaatgttacaattgagtctgtggctgattacttcaagcagattggtattattaagacaaacaagaaaacgggacagcccatgattaatttgtacacagacagggaaactggcaagctgaagggagaggcaacggtctcttttgatgacccaccttcagctaaagcagctattgactggtttgatggtaaagaattctccggaaatcctatcaaggtctcatttgctactcgccgggcagactttaatcggggtggtggcaatggtcgtggaggccgagggcgaggaggacccatgggccgtggaggctatggaggtggtggcagtggtggtggtggccgaggaggatttcccagtggaggtggtggcggtggaggacagcagcgagctggtgactggaagtgtcctaatcccacctgtgagaatatgaacttctcttggaggaatgaatgcaaccagtgtaaggcccctaaaccagatggcccaggagggggaccaggtggctctcacatggggggtaactacggggatgatcgtcgtggtggcagaggaggcgcgatcgcatatccctatgatgtgccggattatgctggagcaccaggaagtgctggttctgctgctggtagtggagcttctaactttactcagttcgttctcgtcgacaatggcggaactggcgacgtgactgtcgccccaagcaacttcgctaacgggatcgctgaatggatcagctctaactcgcgttcacaggcttacaaagtaacctgtagcgttcgtcagagctctgcgcagaatcgcaaatacaccatcaaagtcgaggtgcctaaaggcgcctggcgttcgtacttaaatatggaactaaccattccaattttcgccacgaattccgactgcgagcttattgttaaggcaatgcaaggtctcctaaaagatggaaacccgattccctcagcaatcgcagcaaactccggcatctacggcgccgattacaaggacgatgatgacaagggagcaccaggaagtgctggttctgctgctggtagtggagcgtgcccggtgccgctgcagctgccgccgctggaacgcctgaccctggatgataaaaaaccgctgaataccctgatctctgctactggtctgtggatgagtcgtaccggaaccattcataaaatcaaacaccacgaggttagccgttcgaaaatctatattgagatggcgtgtggcgatcatctggttgtgaacaatagccgctcttctcgtacagcacgtgcactgcgtcaccacaaatatcgtaaaacctgtaaacgttgccgtgtgtccgatgaggatctgaacaaattcctgacaaaagccaatgaggaccaaacaagcgtgaaagtgaaagtcgttagcgctcctacccgtactaaaaaagcaatgccgaaatccgttgctcgtgcccctaaaccactggaaaacactgaagcagcacaggcacagccgtctggaagcaaattctctccggccattcctgtttctacccaggagtccgtttctgttccagcaagtgtgagcaccagcattagcagtattagcaccggtgccaccgctagcgccctggttaaaggcaataccaatccgattacaagcatgtctgccccggttcaagcatcagctccagcactgacaaaatcccaaaccgatcgtctggaggttctgctgaatccgaaagacgaaatcagcctgaattccggcaaaccgtttcgtgaactggagagcgaactgctgtcacgtcgtaaaaaagacctgcaacaaatctatgccgaagaacgtgagaactatctggggaaactggaacgtgaaatcacccgctttttcgtggatcgtggctttctggagatcaaatccccgattctgattcctctggagtatatcgagcgtatgggcatcgacaatgataccgaactgagcaaacaaattttccgtgtggataaaaacttctgtctgcgccctatgctagcaccaaatctggctaactatctgcgcaaactggaccgtgccctgcctgatcctatcaaaatcttcgagatcggcccgtgttatcgtaaagagtccgacggtaaagaacatctggaggagtttaccatgctgaacttttgccaaatgggttcaggttgtactcgtgagaacctggaaagcatcatcaccgattttctgaaccacctgggcattgacttcaaaattgtgggcgacagctgtatggtgtttggcgacaccctggatgtcatgcacggcgacctggaactgtctagtgccgttgtgggcccaatcccgctggatcgtgagtggggtatcgacaaaccttggatcggtgcgggttttggtctggagcgtctgctgaaagtaaaacacgacttcaagaacatcaaacgtgctgcacgttccgagtcctattacaatggtatttctactaacctgatggcgtccacggattacagtacctatagccaagctgcagcgcagcagggctacagtgcttacaccgcccagcccactcaaggatatgcacagaccacccaggcatatgggcaacaaagctatggaacctatggacagcccactgatgtcagctatacccaggctcagaccactgcaacctatgggcagaccgcctatgcaacttcttatggacagcctcccactggttatactactccaactgccccccaggcatacagccagcctgtccaggggtatggcactggtgcttatgataccaccactgctacagtcaccaccacccaggcctcctatgcagctcagtctgcatatggcactcagcctgcttatccagcctatgggcagcagccagcagccactgcacctacaagaccgcaggatggaaacaagcccactgagactagtcaacctcaatctagcacagggggttacaaccagcccagcctaggatatggacagagtaactacagttatccccaggtacctgggagctaccccatgcagccagtcactgcacctccatcctaccctcctaccagctattcctctacacagccgactagttatgatcagagcagttactctcagcagaacacctatgggcaaccgagcagctatggacagcagagtagctatggtcaacaaagcagctatgggcagcagcctcccactagttacccaccccaaactggatcctacagccaagctccaagtcaatatagccaacagagcagcagctacgggcagcagagttcattccgacaggaccaccccagtagcatgggtgtttatgggcaggagtctggaggattttccggaccaggagagaaccggagcatgagtggccctgataaccggggcaggggaagagggggatttgatcgtggaggcatgagcagaggtgggcggggaggaggacgcggtggaatgggcagcgctggagagcgaggtggcttcaataagcctggtggacccatggatgaaggaccagatcttgatctaggcccacctgtagatccagatgaagactctgacaacagtgcaatttatgtacaaggattaaatgacagtgtgactctagatgatctggcagacttctttaagcagtgtggggttgttaagatgaacaagagaactgggcaacccatgatccacatctacctggacaaggaaacaggaaagcccaaaggcgatgccacagtgtcctatgaagacccacctactgccaaggctgccgtggaatggtttgatgggaaagattttcaagggagcaaacttaaagtctcccttgctcggaagaagcctccaatgaacagtatgcggggtggtctgccaccccgtgagggcagaggcatgccaccaccactccgtggaggtccaggaggcccaggaggtcctgggggacccatgggtcgcatgggaggccgtggaggagatagaggaggcttccctccaagaggaccccggggttcccgagggaacccctctggaggaggaaacgtccagcaccgagctggagactggcagtgtcccaatccgggttgtggaaaccagaacttcgcctggagaacagagtgcaaccagtgtaaggccccaaagcctgaaggcttcctcccgccaccctttccgcccccgggtggtgatcgtggcagaggtggccctggtggcatgcggggaggaagaggtggcctcatggatcgtggtggtcccggtggaatgttcagaggtggccgtggtggagacagaggtggcttccgtggtggccggggcatggaccgaggtggctttggtggaggaagacgaggtggccctggggggccccctggacctttgatggaacaggataaaaaaccgctgaataccctgatctctgctactggtctgtggatgagtcgtaccggaaccattcataaaatcaaacaccacgaggttagccgttcgaaaatctatattgagatggcgtgtggcgatcatctggttgtgaacaatagccgctcttctcgtacagcacgtgcactgcgtcaccacaaatatcgtaaaacctgtaaacgttgccgtgtgtccgatgaggatctgaacaaattcctgacaaaagccaatgaggaccaaacaagcgtgaaagtgaaagtcgttagcgctcctacccgtactaaaaaagcaatgccgaaatccgttgctcgtgcccctaaaccactggaaaacactgaagcagcacaggcacagccgtctggaagcaaattctctccggccattcctgtttctacccaggagtccgtttctgttccagcaagtgtgagcaccagcattagcagtattagcaccggtgccaccgctagcgccctggttaaaggcaataccaatccgattacaagcatgtctgccccggttcaagcatcagctccagcactgacaaaatcccaaaccgatcgtctggaggttctgctgaatccgaaagacgaaatcagcctgaattccggcaaaccgtttcgtgaactggagagcgaactgctgtcacgtcgtaaaaaagacctgcaacaaatctatgccgaagaacgtgagaactatctggggaaactggaacgtgaaatcacccgctttttcgtggatcgtggctttctggagatcaaatccccgattctgattcctctggagtatatcgagcgtatgggcatcgacaatgataccgaactgagcaaacaaattttccgtgtggataaaaacttctgtctgcgccctatgctagcaccaaatctggctaactatctgcgcaaactggaccgtgccctgcctgatcctatcaaaatcttcgagatcggcccgtgttatcgtaaagagtccgacggtaaagaacatctggaggagtttaccatgctgaacttttgccaaatgggttcaggttgtactcgtgagaacctggaaagcatcatcaccgattttctgaaccacctgggcattgacttcaaaattgtgggcgacagctgtatggtgtttggcgacaccctggatgtcatgcacggcgacctggaactgtctagtgccgttgtgggcccaatcccgctggatcgtgagtggggtatcgacaaaccttggatcggtgcgggttttggtctggagcgtctgctgaaagtaaaacacgacttcaagaacatcaaacgtgctgcacgttccgagtcctattacaatggtatttctactaacctgtaa

SEQ ID NO: 498 - protein, 2263 aa, Artificial Sequence
  Description of Artificial Sequence: Synthetic polypeptide
  TOM20::FUS::MCP::PylRS(AF)::EWSR1::PylRS(AF)
MVGRNSAIAAGVCGALFIGYCIYFDRKRRSDPNFKNRLRERRKKQKLAKERAGLSKLPDLKDAEAVQKFFMASNDYTQQATQSYGAYPTQPGQGYSQQSSQPYGQQSYSGYSQSTDTSGYGQSSYSSYGQSQNTGYGTQSTPQGYGSTGGYGSSQSSQSSYGQQSSYPGYGQQPAPSSTSGSYGSSSQSSSYGQPQSGSYSQQPSYGGQQQSYGQQQSYNPPQGYGQQNQYNSSSGGGGGGGGGGNYGQDQSSMSSGGGSGGGYGNQDQSGGGGSGGYGQQDRGGRGRGGSGGGGGGGGGGYNRSSGGYEPRGRGGGRGGRGGMGGSDRGGFNKFGGPRDQGSRHDSEQDNSDNNTIFVQGLGENVTIESVADYFKQIGIIKTNKKTGQPMINLYTDRETGKLKGEATVSFDDPPSAKAAIDWFDGKEFSGNPIKVSFATRRADFNRGGGNGRGGRGRGGPMGRGGYGGGGSGGGGRGGFPSGGGGGGGQQRAGDWKCPNPTCENMNFSWRNECNQCKAPKPDGPGGGPGGSHMGGNYGDDRRGGRGGAIAYPYDVPDYAGAPGSAGSAAGSGASNFTQFVLVDNGGTGDVTVAPSNFANGIAEWISSNSRSQAYKVTCSVRQSSAQNRKYTIKVEVPKGAWRSYLNMELTIPIFATNSDCELIVKAMQGLLKDGNPIPSAIAANSGIYGADYKDDDDKGAPGSAGSAAGSGACPVPLQLPPLERLTLDDKKPLNTLISATGLWMSRTGTIHKIKHHEVSRSKIYIEMACGDHLVVNNSRSSRTARALRHHKYRKTCKRCRVSDEDLNKFLTKANEDQTSVKVKVVSAPTRTKKAMPKSVARAPKPLENTEAAQAQPSGSKFSPAIPVSTQESVSVPASVSTSISSISTGATASALVKGNTNPITSMSAPVQASAPALTKSQTDRLEVLLNPKDEISLNSGKPFRELESELLSRRKKDLQQIYAEERENYLGKLEREITRFFVDRGFLEIKSPILIPLEYIERMGIDNDTELSKQIFRVDKNFCLRPMLAPNLANYLRKLDRALPDPIKIFEIGPCYRKESDGKEHLEEFTMLNFCQMGSGCTRENLESIITDFLNHLGIDFKIVGDSCMVFGDTLDVMHGDLELSSAVVGPIPLDREWGIDKPWIGAGFGLERLLKVKHDFKNIKRAARSESYYNGISTNLMASTDYSTYSQAAAQQGYSAYTAQPTQGYAQTTQAYGQQSYGTYGQPTDVSYTQAQTTATYGQTAYATSYGQPPTGYTTPTAPQAYSQPVQGYGTGAYDTTTATVTTTQASYAAQSAYGTQPAYPAYGQQPAATAPTRPQDGNKPTETSQPQSSTGGYNQPSLGYGQSNYSYPQVPGSYPMQPVTAPPSYPPTSYSSTQPTSYDQSSYSQQNTYGQPSSYGQQSSYGQQSSYGQQPPTSYPPQTGSYSQAPSQYSQQSSSYGQQSSFRQDHPSSMGVYGQESGGFSGPGENRSMSGPDNRGRGRGGFDRGGMSRGGRGGGRGGMGSAGERGGFNKPGGPMDEGPDLDLGPPVDPDEDSDNSAIYVQGLNDSVTLDDLADFFKQCGVVKMNKRTGQPMIHIYLDKETGKPKGDATVSYEDPPTAKAAVEWFDGKDFQGSKLKVSLARKKPPMNSMRGGLPPREGRGMPPPLRGGPGGPGGPGGPMGRMGGRGGDRGGFPPRGPRGSRGNPSGGGNVQHRAGDWQCPNPGCGNQNFAWRTECNQCKAPKPEGFLPPPFPPPGGDRGRGGPGGMRGGRGGLMDRGGPGGMFRGGRGGDRGGFRGGRGMDRGGFGGGRRGGPGGPPGPLMEQDKKPLNTLISATGLWMSRTGTIHKIKHHEVSRSKIYIEMACGDHLVVNNSRSSRTARALRHHKYRKTCKRCRVSDEDLNKFLTKANEDQTSVKVKVVSAPTRTKKAMPKSVARAPKPLENTEAAQAQPSGSKFSPAIPVSTQESVSVPASVSTSISSISTGATASALVKGNTNPITSMSAPVQASAPALTKSQTDRLEVLLNPKDEISLNSGKPFRELESELLSRRKKDLQQIYAEERENYLGKLEREITRFFVDRGFLEIKSPILIPLEYIERMGIDNDTELSKQIFRVDKNFCLRPMLAPNLANYLRKLDRALPDPIKIFEIGPCYRKESDGKEHLEEFTMLNFCQMGSGCTRENLESIITDFLNHLGIDFKIVGDSCMVFGDTLDVMHGDLELSSAVVGPIPLDREWGIDKPWIGAGFGLERLLKVKHDFKNIKRAARSESYYNGISTNL

SEQ ID NO: 499 - DNA, 6957 bp, Artificial Sequence
  Description of Artificial Sequence: Synthetic polynucleotide
  TOM20::FUS::4x?N22::PylRS(AF)::EWSR1::PylRS(AF)
atggtgggtcggaacagcgccatcgccgccggtgtatgcggggcccttttcattgggtactgcatctacttcgaccgcaaaagacgaagtgaccccaacttcaagaacaggcttcgagaacgaagaaagaaacagaagcttgccaaggagagagctgggctttccaagttacctgaccttaaagatgctgaagctgttcagaaattcttcatggcctcaaacgattatacccaacaagcaacccaaagctatggggcctaccccacccagcccgggcagggctattcccagcagagcagtcagccctacggacagcagagttacagtggttatagccagtccacggacacttcaggatatggccagagcagctattcttcttatggccagagccagaacacaggctatggaactcagtcaactccccagggatatggctcgactggcggctatggcagtagccagagctcccaatcgtcttacgggcagcagtcctcctaccctggctatggccagcagccagctcccagcagcacctcgggaagttacggtagcagttctcagagcagcagctatgggcagccccagagtgggagctacagccagcagcctagctatggtggacagcagcaaagctatggacagcagcaaagctataatccccctcagggctatggacagcagaaccagtacaacagcagcagtggtggtggaggtggaggtggaggtggaggtaactatggccaagatcaatcctccatgagtagtggtggtggcagtggtggcggttatggcaatcaagaccagagtggtggaggtggcagcggtggctatggacagcaggaccgtggaggccgcggcaggggtggcagtggtggcggcggcggcggcggcggtggtggttacaaccgcagcagtggtggctatgaacccagaggtcgtggaggtggccgtggaggcagaggtggcatgggcggaagtgaccgtggtggcttcaataaatttggtggccctcgggaccaaggatcacgtcatgactccgaacaggataattcagacaacaacaccatctttgtgcaaggcctgggtgagaatgttacaattgagtctgtggctgattacttcaagcagattggtattattaagacaaacaagaaaacgggacagcccatgattaatttgtacacagacagggaaactggcaagctgaagggagaggcaacggtctcttttgatgacccaccttcagctaaagcagctattgactggtttgatggtaaagaattctccggaaatcctatcaaggtctcatttgctactcgccgggcagactttaatcggggtggtggcaatggtcgtggaggccgagggcgaggaggacccatgggccgtggaggctatggaggtggtggcagtggtggtggtggccgaggaggatttcccagtggaggtggtggcggtggaggacagcagcgagctggtgactggaagtgtcctaatcccacctgtgagaatatgaacttctcttggaggaatgaatgcaaccagtgtaaggcccctaaaccagatggcccaggagggggaccaggtggctctcacatggggggtaactacggggatgatcgtcgtggtggcagaggaggcgcgatcgcaggcaagcctattcccaaccccctgctgggcctggatagcaccggagcaccaggaagtgctggttctgctgctggtagtggagcatcgatagagcagaagctgatctcagaggaggacctgctagccaccatggacgcacaaacacgacgacgtgagcgtcgcgctgagaaacaagctcaatggaaagctgcaaacccaccgctcgacggagccggagctggcgctggagctggagccggagctggcggtctagccaccatggacgcacaaacacgacgacgtgagcgtcgcgctgagaaacaagctcaatggaaagctgcaaacccaccgctcgacggagccggagctggcgctggagctggagccggagctggcggtctagccaccatggacgcacaaacacgacgacgtgagcgtcgcgctgagaaacaagctcaatggaaagctgcaaacccaccgctcgacggagccggagctggcgctggagctggagccggagctggcggtctagccaccatggacgcacaaacacgacgacgtgagcgtcgcgctgagaaacaagctcaatggaaagctgcaaacccaccgctcgagtctagagggcccgttggtgctcctggttcagcaggaagcgcagcaggatcaggtgcgtgcccggtgccgctgcagctgccgccgctggaacgcctgaccctggatgacaaaaaaccgctgaataccctgatctctgctactggtctgtggatgagtcgtaccggaaccattcataaaatcaaacaccacgaggttagccgttcgaaaatctatattgagatggcgtgtggcgatcatctggttgtgaacaatagccgctcttctcgtacagcacgtgcactgcgtcaccacaaatatcgtaaaacctgtaaacgttgccgtgtgtccgatgaggatctgaacaaattcctgacaaaagccaatgaggaccaaacaagcgtgaaagtgaaagtcgttagcgctcctacccgtactaaaaaagcaatgccgaaatccgttgctcgtgcccctaaaccactggaaaacactgaagcagcacaggcacagccgtctggaagcaaattctctccggccattcctgtttctacccaggagtccgtttctgttccagcaagtgtgagcaccagcattagcagtattagcaccggtgccaccgctagcgccctggttaaaggcaataccaatccgattacaagcatgtctgccccggttcaagcatcagctccagcactgacaaaatcccaaaccgatcgtctggaggttctgctgaatccgaaagacgaaatcagcctgaattccggcaaaccgtttcgtgaactggagagcgaactgctgtcacgtcgtaaaaaagacctgcaacaaatctatgccgaagaacgtgagaactatctggggaaactggaacgtgaaatcacccgctttttcgtggatcgtggctttctggagatcaaatccccgattctgattcctctggagtatatcgagcgtatgggcatcgacaatgataccgaactgagcaaacaaattttccgtgtggataaaaacttctgtctgcgccctatgctagcaccaaatctggctaactatctgcgcaaactggaccgtgccctgcctgatcctatcaaaatcttcgagatcggcccgtgttatcgtaaagagtccgacggtaaagaacatctggaggagtttaccatgctgaacttttgccaaatgggttcaggttgtactcgtgagaacctggaaagcatcatcaccgattttctgaaccacctgggcattgacttcaaaattgtgggcgacagctgtatggtgtttggcgacaccctggatgtcatgcacggcgacctggaactgtctagtgccgttgtgggcccaatcccgctggatcgtgagtggggtatcgacaaaccttggatcggtgcgggttttggtctggagcgtctgctgaaagtaaaacacgacttcaagaacatcaaacgtgctgcacgttccgagtcctattacaatggtatttctactaacctgatggcgtccacggattacagtacctatagccaagctgcagcgcagcagggctacagtgcttacaccgcccagcccactcaaggatatgcacagaccacccaggcatatgggcaacaaagctatggaacctatggacagcccactgatgtcagctatacccaggctcagaccactgcaacctatgggcagaccgcctatgcaacttcttatggacagcctcccactggttatactactccaactgccccccaggcatacagccagcctgtccaggggtatggcactggtgcttatgataccaccactgctacagtcaccaccacccaggcctcctatgcagctcagtctgcatatggcactcagcctgcttatccagcctatgggcagcagccagcagccactgcacctacaagaccgcaggatggaaacaagcccactgagactagtcaacctcaatctagcacagggggttacaaccagcccagcctaggatatggacagagtaactacagttatccccaggtacctgggagctaccccatgcagccagtcactgcacctccatcctaccctcctaccagctattcctctacacagccgactagttatgatcagagcagttactctcagcagaacacctatgggcaaccgagcagctatggacagcagagtagctatggtcaacaaagcagctatgggcagcagcctcccactagttacccaccccaaactggatcctacagccaagctccaagtcaatatagccaacagagcagcagctacgggcagcagagttcattccgacaggaccaccccagtagcatgggtgtttatgggcaggagtctggaggattttccggaccaggagagaaccggagcatgagtggccctgataaccggggcaggggaagagggggatttgatcgtggaggcatgagcagaggtgggcggggaggaggacgcggtggaatgggcagcgctggagagcgaggtggcttcaataagcctggtggacccatggatgaaggaccagatcttgatctaggcccacctgtagatccagatgaagactctgacaacagtgcaatttatgtacaaggattaaatgacagtgtgactctagatgatctggcagacttctttaagcagtgtggggttgttaagatgaacaagagaactgggcaacccatgatccacatctacctggacaaggaaacaggaaagcccaaaggcgatgccacagtgtcctatgaagacccacctactgccaaggctgccgtggaatggtttgatgggaaagattttcaagggagcaaacttaaagtctcccttgctcggaagaagcctccaatgaacagtatgcggggtggtctgccaccccgtgagggcagaggcatgccaccaccactccgtggaggtccaggaggcccaggaggtcctgggggacccatgggtcgcatgggaggccgtggaggagatagaggaggcttccctccaagaggaccccggggttcccgagggaacccctctggaggaggaaacgtccagcaccgagctggagactggcagtgtcccaatccgggttgtggaaaccagaacttcgcctggagaacagagtgcaaccagtgtaaggccccaaagcctgaaggcttcctcccgccaccctttccgcccccgggtggtgatcgtggcagaggtggccctggtggcatgcggggaggaagaggtggcctcatggatcgtggtggtcccggtggaatgttcagaggtggccgtggtggagacagaggtggcttccgtggtggccggggcatggaccgaggtggctttggtggaggaagacgaggtggccctggggggccccctggacctttgatggaacaggataaaaaaccgctgaataccctgatctctgctactggtctgtggatgagtcgtaccggaaccattcataaaatcaaacaccacgaggttagccgttcgaaaatctatattgagatggcgtgtggcgatcatctggttgtgaacaatagccgctcttctcgtacagcacgtgcactgcgtcaccacaaatatcgtaaaacctgtaaacgttgccgtgtgtccgatgaggatctgaacaaattcctgacaaaagccaatgaggaccaaacaagcgtgaaagtgaaagtcgttagcgctcctacccgtactaaaaaagcaatgccgaaatccgttgctcgtgcccctaaaccactggaaaacactgaagcagcacaggcacagccgtctggaagcaaattctctccggccattcctgtttctacccaggagtccgtttctgttccagcaagtgtgagcaccagcattagcagtattagcaccggtgccaccgctagcgccctggttaaaggcaataccaatccgattacaagcatgtctgccccggttcaagcatcagctccagcactgacaaaatcccaaaccgatcgtctggaggttctgctgaatccgaaagacgaaatcagcctgaattccggcaaaccgtttcgtgaactggagagcgaactgctgtcacgtcgtaaaaaagacctgcaacaaatctatgccgaagaacgtgagaactatctggggaaactggaacgtgaaatcacccgctttttcgtggatcgtggctttctggagatcaaatccccgattctgattcctctggagtatatcgagcgtatgggcatcgacaatgataccgaactgagcaaacaaattttccgtgtggataaaaacttctgtctgcgccctatgctagcaccaaatctggctaactatctgcgcaaactggaccgtgccctgcctgatcctatcaaaatcttcgagatcggcccgtgttatcgtaaagagtccgacggtaaagaacatctggaggagtttaccatgctgaacttttgccaaatgggttcaggttgtactcgtgagaacctggaaagcatcatcaccgattttctgaaccacctgggcattgacttcaaaattgtgggcgacagctgtatggtgtttggcgacaccctggatgtcatgcacggcgacctggaactgtctagtgccgttgtgggcccaatcccgctggatcgtgagtggggtatcgacaaaccttggatcggtgcgggttttggtctggagcgtctgctgaaagtaaaacacgacttcaagaacatcaaacgtgctgcacgttccgagtcctattacaatggtatttctactaacctgtaa

SEQ ID NO: 500 - protein, 2318 aa, Artibeus aztecus
MVGRNSAIAAGVCGALFIGYCIYFDRKRRSDPNFKNRLRERRKKQKLAKERAGLSKLPDLKDAEAVQKFFMASNDYTQQATQSYGAYPTQPGQGYSQQSSQPYGQQSYSGYSQSTDTSGYGQSSYSSYGQSQNTGYGTQSTPQGYGSTGGYGSSQSSQSSYGQQSSYPGYGQQPAPSSTSGSYGSSSQSSSYGQPQSGSYSQQPSYGGQQQSYGQQQSYNPPQGYGQQNQYNSSSGGGGGGGGGGNYGQDQSSMSSGGGSGGGYGNQDQSGGGGSGGYGQQDRGGRGRGGSGGGGGGGGGGYNRSSGGYEPRGRGGGRGGRGGMGGSDRGGFNKFGGPRDQGSRHDSEQDNSDNNTIFVQGLGENVTIESVADYFKQIGIIKTNKKTGQPMINLYTDRETGKLKGEATVSFDDPPSAKAAIDWFDGKEFSGNPIKVSFATRRADFNRGGGNGRGGRGRGGPMGRGGYGGGGSGGGGRGGFPSGGGGGGGQQRAGDWKCPNPTCENMNFSWRNECNQCKAPKPDGPGGGPGGSHMGGNYGDDRRGGRGGAIAGKPIPNPLLGLDSTGAPGSAGSAAGSGASIEQKLISEEDLLATMDAQTRRRERRAEKQAQWKAANPPLDGAGAGAGAGAGAGGLATMDAQTRRRERRAEKQAQWKAANPPLDGAGAGAGAGAGAGGLATMDAQTRRRERRAEKQAQWKAANPPLDGAGAGAGAGAGAGGLATMDAQTRRRERRAEKQAQWKAANPPLESRGPVGAPGSAGSAAGSGACPVPLQLPPLERLTLDDKKPLNTLISATGLWMSRTGTIHKIKHHEVSRSKIYIEMACGDHLVVNNSRSSRTARALRHHKYRKTCKRCRVSDEDLNKFLTKANEDQTSVKVKVVSAPTRTKKAMPKSVARAPKPLENTEAAQAQPSGSKFSPAIPVSTQESVSVPASVSTSISSISTGATASALVKGNTNPITSMSAPVQASAPALTKSQTDRLEVLLNPKDEISLNSGKPFRELESELLSRRKKDLQQIYAEERENYLGKLEREITRFFVDRGFLEIKSPILIPLEYIERMGIDNDTELSKQIFRVDKNFCLRPMLAPNLANYLRKLDRALPDPIKIFEIGPCYRKESDGKEHLEEFTMLNFCQMGSGCTRENLESIITDFLNHLGIDFKIVGDSCMVFGDTLDVMHGDLELSSAVVGPIPLDREWGIDKPWIGAGFGLERLLKVKHDFKNIKRAARSESYYNGISTNLMASTDYSTYSQAAAQQGYSAYTAQPTQGYAQTTQAYGQQSYGTYGQPTDVSYTQAQTTATYGQTAYATSYGQPPTGYTTPTAPQAYSQPVQGYGTGAYDTTTATVTTTQASYAAQSAYGTQPAYPAYGQQPAATAPTRPQDGNKPTETSQPQSSTGGYNQPSLGYGQSNYSYPQVPGSYPMQPVTAPPSYPPTSYSSTQPTSYDQSSYSQQNTYGQPSSYGQQSSYGQQSSYGQQPPTSYPPQTGSYSQAPSQYSQQSSSYGQQSSFRQDHPSSMGVYGQESGGFSGPGENRSMSGPDNRGRGRGGFDRGGMSRGGRGGGRGGMGSAGERGGFNKPGGPMDEGPDLDLGPPVDPDEDSDNSAIYVQGLNDSVTLDDLADFFKQCGVVKMNKRTGQPMIHIYLDKETGKPKGDATVSYEDPPTAKAAVEWFDGKDFQGSKLKVSLARKKPPMNSMRGGLPPREGRGMPPPLRGGPGGPGGPGGPMGRMGGRGGDRGGFPPRGPRGSRGNPSGGGNVQHRAGDWQCPNPGCGNQNFAWRTECNQCKAPKPEGFLPPPFPPPGGDRGRGGPGGMRGGRGGLMDRGGPGGMFRGGRGGDRGGFRGGRGMDRGGFGGGRRGGPGGPPGPLMEQDKKPLNTLISATGLWMSRTGTIHKIKHHEVSRSKIYIEMACGDHLVVNNSRSSRTARALRHHKYRKTCKRCRVSDEDLNKFLTKANEDQTSVKVKVVSAPTRTKKAMPKSVARAPKPLENTEAAQAQPSGSKFSPAIPVSTQESVSVPASVSTSISSISTGATASALVKGNTNPITSMSAPVQASAPALTKSQTDRLEVLLNPKDEISLNSGKPFRELESELLSRRKKDLQQIYAEERENYLGKLEREITRFFVDRGFLEIKSPILIPLEYIERMGIDNDTELSKQIFRVDKNFCLRPMLAPNLANYLRKLDRALPDPIKIFEIGPCYRKESDGKEHLEEFTMLNFCQMGSGCTRENLESIITDFLNHLGIDFKIVGDSCMVFGDTLDVMHGDLELSSAVVGPIPLDREWGIDKPWIGAGFGLERLLKVKHDFKNIKRAARSESYYNGISTNL

SEQ ID NO: 501 - DNA, 6942 bp, Artificial Sequence
  Description of Artificial Sequence: Synthetic polynucleotide
  TOM20::FUS::SYNZIP1::MCP::PylRS(AF)::EWSR1::PylRS(AF)
atggtgggtcggaacagcgccatcgccgccggtgtatgcggggcccttttcattgggtactgcatctacttcgaccgcaaaagacgaagtgaccccaacttcaagaacaggcttcgagaacgaagaaagaaacagaagcttgccaaggagagagctgggctttccaagttacctgaccttaaagatgctgaagctgttcagaaattcttcatggcctcaaacgattatacccaacaagcaacccaaagctatggggcctaccccacccagcccgggcagggctattcccagcagagcagtcagccctacggacagcagagttacagtggttatagccagtccacggacacttcaggatatggccagagcagctattcttcttatggccagagccagaacacaggctatggaactcagtcaactccccagggatatggctcgactggcggctatggcagtagccagagctcccaatcgtcttacgggcagcagtcctcctaccctggctatggccagcagccagctcccagcagcacctcgggaagttacggtagcagttctcagagcagcagctatgggcagccccagagtgggagctacagccagcagcctagctatggtggacagcagcaaagctatggacagcagcaaagctataatccccctcagggctatggacagcagaaccagtacaacagcagcagtggtggtggaggtggaggtggaggtggaggtaactatggccaagatcaatcctccatgagtagtggtggtggcagtggtggcggttatggcaatcaagaccagagtggtggaggtggcagcggtggctatggacagcaggaccgtggaggccgcggcaggggtggcagtggtggcggcggcggcggcggcggtggtggttacaaccgcagcagtggtggctatgaacccagaggtcgtggaggtggccgtggaggcagaggtggcatgggcggaagtgaccgtggtggcttcaataaatttggtggccctcgggaccaaggatcacgtcatgactccgaacaggataattcagacaacaacaccatctttgtgcaaggcctgggtgagaatgttacaattgagtctgtggctgattacttcaagcagattggtattattaagacaaacaagaaaacgggacagcccatgattaatttgtacacagacagggaaactggcaagctgaagggagaggcaacggtctcttttgatgacccaccttcagctaaagcagctattgactggtttgatggtaaagaattctccggaaatcctatcaaggtctcatttgctactcgccgggcagactttaatcggggtggtggcaatggtcgtggaggccgagggcgaggaggacccatgggccgtggaggctatggaggtggtggcagtggtggtggtggccgaggaggatttcccagtggaggtggtggcggtggaggacagcagcgagctggtgactggaagtgtcctaatcccacctgtgagaatatgaacttctcttggaggaatgaatgcaaccagtgtaaggcccctaaaccagatggcccaggagggggaccaggtggctctcacatggggggtaactacggggatgatcgtcgtggtggcagaggaggcgcgatcgcaaatctggtggcccagctggaaaacgaggtggccagcctggaaaacgagaacgaaaccctgaagaaaaagaacctgcacaagaaggacctgatcgcctacctggaaaaggaaatcgccaacctgagaaagaagatcgaggaagcatcgatatatccctatgatgtgccggattatgctggagcaccaggaagtgctggttctgctgctggtagtggagcttctaactttactcagttcgttctcgtcgacaatggcggaactggcgacgtgactgtcgccccaagcaacttcgctaacgggatcgctgaatggatcagctctaactcgcgttcacaggcttacaaagtaacctgtagcgttcgtcagagctctgcgcagaatcgcaaatacaccatcaaagtcgaggtgcctaaaggcgcctggcgttcgtacttaaatatggaactaaccattccaattttcgccacgaattccgactgcgagcttattgttaaggcaatgcaaggtctcctaaaagatggaaacccgattccctcagcaatcgcagcaaactccggcatctacggcgccgattacaaggacgatgatgacaagggagcaccaggaagtgctggttctgctgctggtagtggagcgtgcccggtgccgctgcagctgccgccgctggaacgcctgaccctggatgataaaaaaccgctgaataccctgatctctgctactggtctgtggatgagtcgtaccggaaccattcataaaatcaaacaccacgaggttagccgttcgaaaatctatattgagatggcgtgtggcgatcatctggttgtgaacaatagccgctcttctcgtacagcacgtgcactgcgtcaccacaaatatcgtaaaacctgtaaacgttgccgtgtgtccgatgaggatctgaacaaattcctgacaaaagccaatgaggaccaaacaagcgtgaaagtgaaagtcgttagcgctcctacccgtactaaaaaagcaatgccgaaatccgttgctcgtgcccctaaaccactggaaaacactgaagcagcacaggcacagccgtctggaagcaaattctctccggccattcctgtttctacccaggagtccgtttctgttccagcaagtgtgagcaccagcattagcagtattagcaccggtgccaccgctagcgccctggttaaaggcaataccaatccgattacaagcatgtctgccccggttcaagcatcagctccagcactgacaaaatcccaaaccgatcgtctggaggttctgctgaatccgaaagacgaaatcagcctgaattccggcaaaccgtttcgtgaactggagagcgaactgctgtcacgtcgtaaaaaagacctgcaacaaatctatgccgaagaacgtgagaactatctggggaaactggaacgtgaaatcacccgctttttcgtggatcgtggctttctggagatcaaatccccgattctgattcctctggagtatatcgagcgtatgggcatcgacaatgataccgaactgagcaaacaaattttccgtgtggataaaaacttctgtctgcgccctatgctagcaccaaatctggctaactatctgcgcaaactggaccgtgccctgcctgatcctatcaaaatcttcgagatcggcccgtgttatcgtaaagagtccgacggtaaagaacatctggaggagtttaccatgctgaacttttgccaaatgggttcaggttgtactcgtgagaacctggaaagcatcatcaccgattttctgaaccacctgggcattgacttcaaaattgtgggcgacagctgtatggtgtttggcgacaccctggatgtcatgcacggcgacctggaactgtctagtgccgttgtgggcccaatcccgctggatcgtgagtggggtatcgacaaaccttggatcggtgcgggttttggtctggagcgtctgctgaaagtaaaacacgacttcaagaacatcaaacgtgctgcacgttccgagtcctattacaatggtatttctactaacctgatggcgtccacggattacagtacctatagccaagctgcagcgcagcagggctacagtgcttacaccgcccagcccactcaaggatatgcacagaccacccaggcatatgggcaacaaagctatggaacctatggacagcccactgatgtcagctatacccaggctcagaccactgcaacctatgggcagaccgcctatgcaacttcttatggacagcctcccactggttatactactccaactgccccccaggcatacagccagcctgtccaggggtatggcactggtgcttatgataccaccactgctacagtcaccaccacccaggcctcctatgcagctcagtctgcatatggcactcagcctgcttatccagcctatgggcagcagccagcagccactgcacctacaagaccgcaggatggaaacaagcccactgagactagtcaacctcaatctagcacagggggttacaaccagcccagcctaggatatggacagagtaactacagttatccccaggtacctgggagctaccccatgcagccagtcactgcacctccatcctaccctcctaccagctattcctctacacagccgactagttatgatcagagcagttactctcagcagaacacctatgggcaaccgagcagctatggacagcagagtagctatggtcaacaaagcagctatgggcagcagcctcccactagttacccaccccaaactggatcctacagccaagctccaagtcaatatagccaacagagcagcagctacgggcagcagagttcattccgacaggaccaccccagtagcatgggtgtttatgggcaggagtctggaggattttccggaccaggagagaaccggagcatgagtggccctgataaccggggcaggggaagagggggatttgatcgtggaggcatgagcagaggtgggcggggaggaggacgcggtggaatgggcagcgctggagagcgaggtggcttcaataagcctggtggacccatggatgaaggaccagatcttgatctaggcccacctgtagatccagatgaagactctgacaacagtgcaatttatgtacaaggattaaatgacagtgtgactctagatgatctggcagacttctttaagcagtgtggggttgttaagatgaacaagagaactgggcaacccatgatccacatctacctggacaaggaaacaggaaagcccaaaggcgatgccacagtgtcctatgaagacccacctactgccaaggctgccgtggaatggtttgatgggaaagattttcaagggagcaaacttaaagtctcccttgctcggaagaagcctccaatgaacagtatgcggggtggtctgccaccccgtgagggcagaggcatgccaccaccactccgtggaggtccaggaggcccaggaggtcctgggggacccatgggtcgcatgggaggccgtggaggagatagaggaggcttccctccaagaggaccccggggttcccgagggaacccctctggaggaggaaacgtccagcaccgagctggagactggcagtgtcccaatccgggttgtggaaaccagaacttcgcctggagaacagagtgcaaccagtgtaaggccccaaagcctgaaggcttcctcccgccaccctttccgcccccgggtggtgatcgtggcagaggtggccctggtggcatgcggggaggaagaggtggcctcatggatcgtggtggtcccggtggaatgttcagaggtggccgtggtggagacagaggtggcttccgtggtggccggggcatggaccgaggtggctttggtggaggaagacgaggtggccctggggggccccctggacctttgatggaacaggataaaaaaccgctgaataccctgatctctgctactggtctgtggatgagtcgtaccggaaccattcataaaatcaaacaccacgaggttagccgttcgaaaatctatattgagatggcgtgtggcgatcatctggttgtgaacaatagccgctcttctcgtacagcacgtgcactgcgtcaccacaaatatcgtaaaacctgtaaacgttgccgtgtgtccgatgaggatctgaacaaattcctgacaaaagccaatgaggaccaaacaagcgtgaaagtgaaagtcgttagcgctcctacccgtactaaaaaagcaatgccgaaatccgttgctcgtgcccctaaaccactggaaaacactgaagcagcacaggcacagccgtctggaagcaaattctctccggccattcctgtttctacccaggagtccgtttctgttccagcaagtgtgagcaccagcattagcagtattagcaccggtgccaccgctagcgccctggttaaaggcaataccaatccgattacaagcatgtctgccccggttcaagcatcagctccagcactgacaaaatcccaaaccgatcgtctggaggttctgctgaatccgaaagacgaaatcagcctgaattccggcaaaccgtttcgtgaactggagagcgaactgctgtcacgtcgtaaaaaagacctgcaacaaatctatgccgaagaacgtgagaactatctggggaaactggaacgtgaaatcacccgctttttcgtggatcgtggctttctggagatcaaatccccgattctgattcctctggagtatatcgagcgtatgggcatcgacaatgataccgaactgagcaaacaaattttccgtgtggataaaaacttctgtctgcgccctatgctagcaccaaatctggctaactatctgcgcaaactggaccgtgccctgcctgatcctatcaaaatcttcgagatcggcccgtgttatcgtaaagagtccgacggtaaagaacatctggaggagtttaccatgctgaacttttgccaaatgggttcaggttgtactcgtgagaacctggaaagcatcatcaccgattttctgaaccacctgggcattgacttcaaaattgtgggcgacagctgtatggtgtttggcgacaccctggatgtcatgcacggcgacctggaactgtctagtgccgttgtgggcccaatcccgctggatcgtgagtggggtatcgacaaaccttggatcggtgcgggttttggtctggagcgtctgctgaaagtaaaacacgacttcaagaacatcaaacgtgctgcacgttccgagtcctattacaatggtatttctactaacctgtaa

SEQ ID NO: 502 - protein, 2313 aa, Artificial Sequence
  Description of Artificial Sequence: Synthetic polypeptide
  TOM20::FUS::SYNZIP1::MCP::PylRS(AF)::EWSR1::PylRS(AF)
MVGRNSAIAAGVCGALFIGYCIYFDRKRRSDPNFKNRLRERRKKQKLAKERAGLSKLPDLKDAEAVQKFFMASNDYTQQATQSYGAYPTQPGQGYSQQSSQPYGQQSYSGYSQSTDTSGYGQSSYSSYGQSQNTGYGTQSTPQGYGSTGGYGSSQSSQSSYGQQSSYPGYGQQPAPSSTSGSYGSSSQSSSYGQPQSGSYSQQPSYGGQQQSYGQQQSYNPPQGYGQQNQYNSSSGGGGGGGGGGNYGQDQSSMSSGGGSGGGYGNQDQSGGGGSGGYGQQDRGGRGRGGSGGGGGGGGGGYNRSSGGYEPRGRGGGRGGRGGMGGSDRGGFNKFGGPRDQGSRHDSEQDNSDNNTIFVQGLGENVTIESVADYFKQIGIIKTNKKTGQPMINLYTDRETGKLKGEATVSFDDPPSAKAAIDWFDGKEFSGNPIKVSFATRRADFNRGGGNGRGGRGRGGPMGRGGYGGGGSGGGGRGGFPSGGGGGGGQQRAGDWKCPNPTCENMNFSWRNECNQCKAPKPDGPGGGPGGSHMGGNYGDDRRGGRGGAIANLVAQLENEVASLENENETLKKKNLHKKDLIAYLEKEIANLRKKIEEASIYPYDVPDYAGAPGSAGSAAGSGASNFTQFVLVDNGGTGDVTVAPSNFANGIAEWISSNSRSQAYKVTCSVRQSSAQNRKYTIKVEVPKGAWRSYLNMELTIPIFATNSDCELIVKAMQGLLKDGNPIPSAIAANSGIYGADYKDDDDKGAPGSAGSAAGSGACPVPLQLPPLERLTLDDKKPLNTLISATGLWMSRTGTIHKIKHHEVSRSKIYIEMACGDHLVVNNSRSSRTARALRHHKYRKTCKRCRVSDEDLNKFLTKANEDQTSVKVKVVSAPTRTKKAMPKSVARAPKPLENTEAAQAQPSGSKFSPAIPVSTQESVSVPASVSTSISSISTGATASALVKGNTNPITSMSAPVQASAPALTKSQTDRLEVLLNPKDEISLNSGKPFRELESELLSRRKKDLQQIYAEERENYLGKLEREITRFFVDRGFLEIKSPILIPLEYIERMGIDNDTELSKQIFRVDKNFCLRPMLAPNLANYLRKLDRALPDPIKIFEIGPCYRKESDGKEHLEEFTMLNFCQMGSGCTRENLESIITDFLNHLGIDFKIVGDSCMVFGDTLDVMHGDLELSSAVVGPIPLDREWGIDKPWIGAGFGLERLLKVKHDFKNIKRAARSESYYNGISTNLMASTDYSTYSQAAAQQGYSAYTAQPTQGYAQTTQAYGQQSYGTYGQPTDVSYTQAQTTATYGQTAYATSYGQPPTGYTTPTAPQAYSQPVQGYGTGAYDTTTATVTTTQASYAAQSAYGTQPAYPAYGQQPAATAPTRPQDGNKPTETSQPQSSTGGYNQPSLGYGQSNYSYPQVPGSYPMQPVTAPPSYPPTSYSSTQPTSYDQSSYSQQNTYGQPSSYGQQSSYGQQSSYGQQPPTSYPPQTGSYSQAPSQYSQQSSSYGQQSSFRQDHPSSMGVYGQESGGFSGPGENRSMSGPDNRGRGRGGFDRGGMSRGGRGGGRGGMGSAGERGGFNKPGGPMDEGPDLDLGPPVDPDEDSDNSAIYVQGLNDSVTLDDLADFFKQCGVVKMNKRTGQPMIHIYLDKETGKPKGDATVSYEDPPTAKAAVEWFDGKDFQGSKLKVSLARKKPPMNSMRGGLPPREGRGMPPPLRGGPGGPGGPGGPMGRMGGRGGDRGGFPPRGPRGSRGNPSGGGNVQHRAGDWQCPNPGCGNQNFAWRTECNQCKAPKPEGFLPPPFPPPGGDRGRGGPGGMRGGRGGLMDRGGPGGMFRGGRGGDRGGFRGGRGMDRGGFGGGRRGGPGGPPGPLMEQDKKPLNTLISATGLWMSRTGTIHKIKHHEVSRSKIYIEMACGDHLVVNNSRSSRTARALRHHKYRKTCKRCRVSDEDLNKFLTKANEDQTSVKVKVVSAPTRTKKAMPKSVARAPKPLENTEAAQAQPSGSKFSPAIPVSTQESVSVPASVSTSISSISTGATASALVKGNTNPITSMSAPVQASAPALTKSQTDRLEVLLNPKDEISLNSGKPFRELESELLSRRKKDLQQIYAEERENYLGKLEREITRFFVDRGFLEIKSPILIPLEYIERMGIDNDTELSKQIFRVDKNFCLRPMLAPNLANYLRKLDRALPDPIKIFEIGPCYRKESDGKEHLEEFTMLNFCQMGSGCTRENLESIITDFLNHLGIDFKIVGDSCMVFGDTLDVMHGDLELSSAVVGPIPLDREWGIDKPWIGAGFGLERLLKVKHDFKNIKRAARSESYYNGISTNL

SEQ ID NO: 503 - DNA, 6951 bp, Artificial Sequence
  Description of Artificial Sequence: Synthetic polynucleotide
  TOM20::FUS::SYNZIP2::MCP::PylRS(AF)::EWSR1::PylRS(AF)
atggtgggtcggaacagcgccatcgccgccggtgtatgcggggcccttttcattgggtactgcatctacttcgaccgcaaaagacgaagtgaccccaacttcaagaacaggcttcgagaacgaagaaagaaacagaagcttgccaaggagagagctgggctttccaagttacctgaccttaaagatgctgaagctgttcagaaattcttcatggcctcaaacgattatacccaacaagcaacccaaagctatggggcctaccccacccagcccgggcagggctattcccagcagagcagtcagccctacggacagcagagttacagtggttatagccagtccacggacacttcaggatatggccagagcagctattcttcttatggccagagccagaacacaggctatggaactcagtcaactccccagggatatggctcgactggcggctatggcagtagccagagctcccaatcgtcttacgggcagcagtcctcctaccctggctatggccagcagccagctcccagcagcacctcgggaagttacggtagcagttctcagagcagcagctatgggcagccccagagtgggagctacagccagcagcctagctatggtggacagcagcaaagctatggacagcagcaaagctataatccccctcagggctatggacagcagaaccagtacaacagcagcagtggtggtggaggtggaggtggaggtggaggtaactatggccaagatcaatcctccatgagtagtggtggtggcagtggtggcggttatggcaatcaagaccagagtggtggaggtggcagcggtggctatggacagcaggaccgtggaggccgcggcaggggtggcagtggtggcggcggcggcggcggcggtggtggttacaaccgcagcagtggtggctatgaacccagaggtcgtggaggtggccgtggaggcagaggtggcatgggcggaagtgaccgtggtggcttcaataaatttggtggccctcgggaccaaggatcacgtcatgactccgaacaggataattcagacaacaacaccatctttgtgcaaggcctgggtgagaatgttacaattgagtctgtggctgattacttcaagcagattggtattattaagacaaacaagaaaacgggacagcccatgattaatttgtacacagacagggaaactggcaagctgaagggagaggcaacggtctcttttgatgacccaccttcagctaaagcagctattgactggtttgatggtaaagaattctccggaaatcctatcaaggtctcatttgctactcgccgggcagactttaatcggggtggtggcaatggtcgtggaggccgagggcgaggaggacccatgggccgtggaggctatggaggtggtggcagtggtggtggtggccgaggaggatttcccagtggaggtggtggcggtggaggacagcagcgagctggtgactggaagtgtcctaatcccacctgtgagaatatgaacttctcttggaggaatgaatgcaaccagtgtaaggcccctaaaccagatggcccaggagggggaccaggtggctctcacatggggggtaactacggggatgatcgtcgtggtggcagaggaggcgcgatcgcagctagaaacgcctacctgagaaagaaaatcgccagactgaagaaggacaacctgcagctggaaagagacgagcagaacctggaaaagatcatcgccaacctcagagatgagatcgccagactggaaaacgaggtggccagccacgagcaggcatcgatatatccctatgatgtgccggattatgctggagcaccaggaagtgctggttctgctgctggtagtggagcttctaactttactcagttcgttctcgtcgacaatggcggaactggcgacgtgactgtcgccccaagcaacttcgctaacgggatcgctgaatggatcagctctaactcgcgttcacaggcttacaaagtaacctgtagcgttcgtcagagctctgcgcagaatcgcaaatacaccatcaaagtcgaggtgcctaaaggcgcctggcgttcgtacttaaatatggaactaaccattccaattttcgccacgaattccgactgcgagcttattgttaaggcaatgcaaggtctcctaaaagatggaaacccgattccctcagcaatcgcagcaaactccggcatctacggcgccgattacaaggacgatgatgacaagggagcaccaggaagtgctggttctgctgctggtagtggagcgtgcccggtgccgctgcagctgccgccgctggaacgcctgaccctggatgataaaaaaccgctgaataccctgatctctgctactggtctgtggatgagtcgtaccggaaccattcataaaatcaaacaccacgaggttagccgttcgaaaatctatattgagatggcgtgtggcgatcatctggttgtgaacaatagccgctcttctcgtacagcacgtgcactgcgtcaccacaaatatcgtaaaacctgtaaacgttgccgtgtgtccgatgaggatctgaacaaattcctgacaaaagccaatgaggaccaaacaagcgtgaaagtgaaagtcgttagcgctcctacccgtactaaaaaagcaatgccgaaatccgttgctcgtgcccctaaaccactggaaaacactgaagcagcacaggcacagccgtctggaagcaaattctctccggccattcctgtttctacccaggagtccgtttctgttccagcaagtgtgagcaccagcattagcagtattagcaccggtgccaccgctagcgccctggttaaaggcaataccaatccgattacaagcatgtctgccccggttcaagcatcagctccagcactgacaaaatcccaaaccgatcgtctggaggttctgctgaatccgaaagacgaaatcagcctgaattccggcaaaccgtttcgtgaactggagagcgaactgctgtcacgtcgtaaaaaagacctgcaacaaatctatgccgaagaacgtgagaactatctggggaaactggaacgtgaaatcacccgctttttcgtggatcgtggctttctggagatcaaatccccgattctgattcctctggagtatatcgagcgtatgggcatcgacaatgataccgaactgagcaaacaaattttccgtgtggataaaaacttctgtctgcgccctatgctagcaccaaatctggctaactatctgcgcaaactggaccgtgccctgcctgatcctatcaaaatcttcgagatcggcccgtgttatcgtaaagagtccgacggtaaagaacatctggaggagtttaccatgctgaacttttgccaaatgggttcaggttgtactcgtgagaacctggaaagcatcatcaccgattttctgaaccacctgggcattgacttcaaaattgtgggcgacagctgtatggtgtttggcgacaccctggatgtcatgcacggcgacctggaactgtctagtgccgttgtgggcccaatcccgctggatcgtgagtggggtatcgacaaaccttggatcggtgcgggttttggtctggagcgtctgctgaaagtaaaacacgacttcaagaacatcaaacgtgctgcacgttccgagtcctattacaatggtatttctactaacctgatggcgtccacggattacagtacctatagccaagctgcagcgcagcagggctacagtgcttacaccgcccagcccactcaaggatatgcacagaccacccaggcatatgggcaacaaagctatggaacctatggacagcccactgatgtcagctatacccaggctcagaccactgcaacctatgggcagaccgcctatgcaacttcttatggacagcctcccactggttatactactccaactgccccccaggcatacagccagcctgtccaggggtatggcactggtgcttatgataccaccactgctacagtcaccaccacccaggcctcctatgcagctcagtctgcatatggcactcagcctgcttatccagcctatgggcagcagccagcagccactgcacctacaagaccgcaggatggaaacaagcccactgagactagtcaacctcaatctagcacagggggttacaaccagcccagcctaggatatggacagagtaactacagttatccccaggtacctgggagctaccccatgcagccagtcactgcacctccatcctaccctcctaccagctattcctctacacagccgactagttatgatcagagcagttactctcagcagaacacctatgggcaaccgagcagctatggacagcagagtagctatggtcaacaaagcagctatgggcagcagcctcccactagttacccaccccaaactggatcctacagccaagctccaagtcaatatagccaacagagcagcagctacgggcagcagagttcattccgacaggaccaccccagtagcatgggtgtttatgggcaggagtctggaggattttccggaccaggagagaaccggagcatgagtggccctgataaccggggcaggggaagagggggatttgatcgtggaggcatgagcagaggtgggcggggaggaggacgcggtggaatgggcagcgctggagagcgaggtggcttcaataagcctggtggacccatggatgaaggaccagatcttgatctaggcccacctgtagatccagatgaagactctgacaacagtgcaatttatgtacaaggattaaatgacagtgtgactctagatgatctggcagacttctttaagcagtgtggggttgttaagatgaacaagagaactgggcaacccatgatccacatctacctggacaaggaaacaggaaagcccaaaggcgatgccacagtgtcctatgaagacccacctactgccaaggctgccgtggaatggtttgatgggaaagattttcaagggagcaaacttaaagtctcccttgctcggaagaagcctccaatgaacagtatgcggggtggtctgccaccccgtgagggcagaggcatgccaccaccactccgtggaggtccaggaggcccaggaggtcctgggggacccatgggtcgcatgggaggccgtggaggagatagaggaggcttccctccaagaggaccccggggttcccgagggaacccctctggaggaggaaacgtccagcaccgagctggagactggcagtgtcccaatccgggttgtggaaaccagaacttcgcctggagaacagagtgcaaccagtgtaaggccccaaagcctgaaggcttcctcccgccaccctttccgcccccgggtggtgatcgtggcagaggtggccctggtggcatgcggggaggaagaggtggcctcatggatcgtggtggtcccggtggaatgttcagaggtggccgtggtggagacagaggtggcttccgtggtggccggggcatggaccgaggtggctttggtggaggaagacgaggtggccctggggggccccctggacctttgatggaacaggataaaaaaccgctgaataccctgatctctgctactggtctgtggatgagtcgtaccggaaccattcataaaatcaaacaccacgaggttagccgttcgaaaatctatattgagatggcgtgtggcgatcatctggttgtgaacaatagccgctcttctcgtacagcacgtgcactgcgtcaccacaaatatcgtaaaacctgtaaacgttgccgtgtgtccgatgaggatctgaacaaattcctgacaaaagccaatgaggaccaaacaagcgtgaaagtgaaagtcgttagcgctcctacccgtactaaaaaagcaatgccgaaatccgttgctcgtgcccctaaaccactggaaaacactgaagcagcacaggcacagccgtctggaagcaaattctctccggccattcctgtttctacccaggagtccgtttctgttccagcaagtgtgagcaccagcattagcagtattagcaccggtgccaccgctagcgccctggttaaaggcaataccaatccgattacaagcatgtctgccccggttcaagcatcagctccagcactgacaaaatcccaaaccgatcgtctggaggttctgctgaatccgaaagacgaaatcagcctgaattccggcaaaccgtttcgtgaactggagagcgaactgctgtcacgtcgtaaaaaagacctgcaacaaatctatgccgaagaacgtgagaactatctggggaaactggaacgtgaaatcacccgctttttcgtggatcgtggctttctggagatcaaatccccgattctgattcctctggagtatatcgagcgtatgggcatcgacaatgataccgaactgagcaaacaaattttccgtgtggataaaaacttctgtctgcgccctatgctagcaccaaatctggctaactatctgcgcaaactggaccgtgccctgcctgatcctatcaaaatcttcgagatcggcccgtgttatcgtaaagagtccgacggtaaagaacatctggaggagtttaccatgctgaacttttgccaaatgggttcaggttgtactcgtgagaacctggaaagcatcatcaccgattttctgaaccacctgggcattgacttcaaaattgtgggcgacagctgtatggtgtttggcgacaccctggatgtcatgcacggcgacctggaactgtctagtgccgttgtgggcccaatcccgctggatcgtgagtggggtatcgacaaaccttggatcggtgcgggttttggtctggagcgtctgctgaaagtaaaacacgacttcaagaacatcaaacgtgctgcacgttccgagtcctattacaatggtatttctactaacctgtaa

SEQ ID NO: 504 - protein, 2316 aa, Artificial Sequence
  Description of Artificial Sequence: Synthetic polypeptide
  TOM20::FUS::SYNZIP2::MCP::PylRS(AF)::EWSR1::PylRS(AF)
MVGRNSAIAAGVCGALFIGYCIYFDRKRRSDPNFKNRLRERRKKQKLAKERAGLSKLPDLKDAEAVQKFFMASNDYTQQATQSYGAYPTQPGQGYSQQSSQPYGQQSYSGYSQSTDTSGYGQSSYSSYGQSQNTGYGTQSTPQGYGSTGGYGSSQSSQSSYGQQSSYPGYGQQPAPSSTSGSYGSSSQSSSYGQPQSGSYSQQPSYGGQQQSYGQQQSYNPPQGYGQQNQYNSSSGGGGGGGGGGNYGQDQSSMSSGGGSGGGYGNQDQSGGGGSGGYGQQDRGGRGRGGSGGGGGGGGGGYNRSSGGYEPRGRGGGRGGRGGMGGSDRGGFNKFGGPRDQGSRHDSEQDNSDNNTIFVQGLGENVTIESVADYFKQIGIIKTNKKTGQPMINLYTDRETGKLKGEATVSFDDPPSAKAAIDWFDGKEFSGNPIKVSFATRRADFNRGGGNGRGGRGRGGPMGRGGYGGGGSGGGGRGGFPSGGGGGGGQQRAGDWKCPNPTCENMNFSWRNECNQCKAPKPDGPGGGPGGSHMGGNYGDDRRGGRGGAIAARNAYLRKKIARLKKDNLQLERDEQNLEKIIANLRDEIARLENEVASHEQASIYPYDVPDYAGAPGSAGSAAGSGASNFTQFVLVDNGGTGDVTVAPSNFANGIAEWISSNSRSQAYKVTCSVRQSSAQNRKYTIKVEVPKGAWRSYLNMELTIPIFATNSDCELIVKAMQGLLKDGNPIPSAIAANSGIYGADYKDDDDKGAPGSAGSAAGSGACPVPLQLPPLERLTLDDKKPLNTLISATGLWMSRTGTIHKIKHHEVSRSKIYIEMACGDHLVVNNSRSSRTARALRHHKYRKTCKRCRVSDEDLNKFLTKANEDQTSVKVKVVSAPTRTKKAMPKSVARAPKPLENTEAAQAQPSGSKFSPAIPVSTQESVSVPASVSTSISSISTGATASALVKGNTNPITSMSAPVQASAPALTKSQTDRLEVLLNPKDEISLNSGKPFRELESELLSRRKKDLQQIYAEERENYLGKLEREITRFFVDRGFLEIKSPILIPLEYIERMGIDNDTELSKQIFRVDKNFCLRPMLAPNLANYLRKLDRALPDPIKIFEIGPCYRKESDGKEHLEEFTMLNFCQMGSGCTRENLESIITDFLNHLGIDFKIVGDSCMVFGDTLDVMHGDLELSSAVVGPIPLDREWGIDKPWIGAGFGLERLLKVKHDFKNIKRAARSESYYNGISTNLMASTDYSTYSQAAAQQGYSAYTAQPTQGYAQTTQAYGQQSYGTYGQPTDVSYTQAQTTATYGQTAYATSYGQPPTGYTTPTAPQAYSQPVQGYGTGAYDTTTATVTTTQASYAAQSAYGTQPAYPAYGQQPAATAPTRPQDGNKPTETSQPQSSTGGYNQPSLGYGQSNYSYPQVPGSYPMQPVTAPPSYPPTSYSSTQPTSYDQSSYSQQNTYGQPSSYGQQSSYGQQSSYGQQPPTSYPPQTGSYSQAPSQYSQQSSSYGQQSSFRQDHPSSMGVYGQESGGFSGPGENRSMSGPDNRGRGRGGFDRGGMSRGGRGGGRGGMGSAGERGGFNKPGGPMDEGPDLDLGPPVDPDEDSDNSAIYVQGLNDSVTLDDLADFFKQCGVVKMNKRTGQPMIHIYLDKETGKPKGDATVSYEDPPTAKAAVEWFDGKDFQGSKLKVSLARKKPPMNSMRGGLPPREGRGMPPPLRGGPGGPGGPGGPMGRMGGRGGDRGGFPPRGPRGSRGNPSGGGNVQHRAGDWQCPNPGCGNQNFAWRTECNQCKAPKPEGFLPPPFPPPGGDRGRGGPGGMRGGRGGLMDRGGPGGMFRGGRGGDRGGFRGGRGMDRGGFGGGRRGGPGGPPGPLMEQDKKPLNTLISATGLWMSRTGTIHKIKHHEVSRSKIYIEMACGDHLVVNNSRSSRTARALRHHKYRKTCKRCRVSDEDLNKFLTKANEDQTSVKVKVVSAPTRTKKAMPKSVARAPKPLENTEAAQAQPSGSKFSPAIPVSTQESVSVPASVSTSISSISTGATASALVKGNTNPITSMSAPVQASAPALTKSQTDRLEVLLNPKDEISLNSGKPFRELESELLSRRKKDLQQIYAEERENYLGKLEREITRFFVDRGFLEIKSPILIPLEYIERMGIDNDTELSKQIFRVDKNFCLRPMLAPNLANYLRKLDRALPDPIKIFEIGPCYRKESDGKEHLEEFTMLNFCQMGSGCTRENLESIITDFLNHLGIDFKIVGDSCMVFGDTLDVMHGDLELSSAVVGPIPLDREWGIDKPWIGAGFGLERLLKVKHDFKNIKRAARSESYYNGISTNL

SEQ ID NO: 505 - DNA, 6771 bp, Artificial Sequence
  Description of Artificial Sequence: Synthetic polynucleotide
  LCK::FUS::SYNZIP1::MCP::PylRS(AF)::EWSR1::PylRS(AF)
atgggctgcgtgtgcagcagcaaccccgagggtaccgagctcgcctcaaacgattatacccaacaagcaacccaaagctatggggcctaccccacccagcccgggcagggctattcccagcagagcagtcagccctacggacagcagagttacagtggttatagccagtccacggacacttcaggatatggccagagcagctattcttcttatggccagagccagaacacaggctatggaactcagtcaactccccagggatatggctcgactggcggctatggcagtagccagagctcccaatcgtcttacgggcagcagtcctcctaccctggctatggccagcagccagctcccagcagcacctcgggaagttacggtagcagttctcagagcagcagctatgggcagccccagagtgggagctacagccagcagcctagctatggtggacagcagcaaagctatggacagcagcaaagctataatccccctcagggctatggacagcagaaccagtacaacagcagcagtggtggtggaggtggaggtggaggtggaggtaactatggccaagatcaatcctccatgagtagtggtggtggcagtggtggcggttatggcaatcaagaccagagtggtggaggtggcagcggtggctatggacagcaggaccgtggaggccgcggcaggggtggcagtggtggcggcggcggcggcggcggtggtggttacaaccgcagcagtggtggctatgaacccagaggtcgtggaggtggccgtggaggcagaggtggcatgggcggaagtgaccgtggtggcttcaataaatttggtggccctcgggaccaaggatcacgtcatgactccgaacaggataattcagacaacaacaccatctttgtgcaaggcctgggtgagaatgttacaattgagtctgtggctgattacttcaagcagattggtattattaagacaaacaagaaaacgggacagcccatgattaatttgtacacagacagggaaactggcaagctgaagggagaggcaacggtctcttttgatgacccaccttcagctaaagcagctattgactggtttgatggtaaagaattctccggaaatcctatcaaggtctcatttgctactcgccgggcagactttaatcggggtggtggcaatggtcgtggaggccgagggcgaggaggacccatgggccgtggaggctatggaggtggtggcagtggtggtggtggccgaggaggatttcccagtggaggtggtggcggtggaggacagcagcgagctggtgactggaagtgtcctaatcccacctgtgagaatatgaacttctcttggaggaatgaatgcaaccagtgtaaggcccctaaaccagatggcccaggagggggaccaggtggctctcacatggggggtaactacggggatgatcgtcgtggtggcagaggaggcgcgatcgcaaatctggtggcccagctggaaaacgaggtggccagcctggaaaacgagaacgaaaccctgaagaaaaagaacctgcacaagaaggacctgatcgcctacctggaaaaggaaatcgccaacctgagaaagaagatcgaggaagcatcgatatatccctatgatgtgccggattatgctggagcaccaggaagtgctggttctgctgctggtagtggagcttctaactttactcagttcgttctcgtcgacaatggcggaactggcgacgtgactgtcgccccaagcaacttcgctaacgggatcgctgaatggatcagctctaactcgcgttcacaggcttacaaagtaacctgtagcgttcgtcagagctctgcgcagaatcgcaaatacaccatcaaagtcgaggtgcctaaaggcgcctggcgttcgtacttaaatatggaactaaccattccaattttcgccacgaattccgactgcgagcttattgttaaggcaatgcaaggtctcctaaaagatggaaacccgattccctcagcaatcgcagcaaactccggcatctacggcgccgattacaaggacgatgatgacaagggagcaccaggaagtgctggttctgctgctggtagtggagcgtgcccggtgccgctgcagctgccgccgctggaacgcctgaccctggatgataaaaaaccgctgaataccctgatctctgctactggtctgtggatgagtcgtaccggaaccattcataaaatcaaacaccacgaggttagccgttcgaaaatctatattgagatggcgtgtggcgatcatctggttgtgaacaatagccgctcttctcgtacagcacgtgcactgcgtcaccacaaatatcgtaaaacctgtaaacgttgccgtgtgtccgatgaggatctgaacaaattcctgacaaaagccaatgaggaccaaacaagcgtgaaagtgaaagtcgttagcgctcctacccgtactaaaaaagcaatgccgaaatccgttgctcgtgcccctaaaccactggaaaacactgaagcagcacaggcacagccgtctggaagcaaattctctccggccattcctgtttctacccaggagtccgtttctgttccagcaagtgtgagcaccagcattagcagtattagcaccggtgccaccgctagcgccctggttaaaggcaataccaatccgattacaagcatgtctgccccggttcaagcatcagctccagcactgacaaaatcccaaaccgatcgtctggaggttctgctgaatccgaaagacgaaatcagcctgaattccggcaaaccgtttcgtgaactggagagcgaactgctgtcacgtcgtaaaaaagacctgcaacaaatctatgccgaagaacgtgagaactatctggggaaactggaacgtgaaatcacccgctttttcgtggatcgtggctttctggagatcaaatccccgattctgattcctctggagtatatcgagcgtatgggcatcgacaatgataccgaactgagcaaacaaattttccgtgtggataaaaacttctgtctgcgccctatgctagcaccaaatctggctaactatctgcgcaaactggaccgtgccctgcctgatcctatcaaaatcttcgagatcggcccgtgttatcgtaaagagtccgacggtaaagaacatctggaggagtttaccatgctgaacttttgccaaatgggttcaggttgtactcgtgagaacctggaaagcatcatcaccgattttctgaaccacctgggcattgacttcaaaattgtgggcgacagctgtatggtgtttggcgacaccctggatgtcatgcacggcgacctggaactgtctagtgccgttgtgggcccaatcccgctggatcgtgagtggggtatcgacaaaccttggatcggtgcgggttttggtctggagcgtctgctgaaagtaaaacacgacttcaagaacatcaaacgtgctgcacgttccgagtcctattacaatggtatttctactaacctgatggcgtccacggattacagtacctatagccaagctgcagcgcagcagggctacagtgcttacaccgcccagcccactcaaggatatgcacagaccacccaggcatatgggcaacaaagctatggaacctatggacagcccactgatgtcagctatacccaggctcagaccactgcaacctatgggcagaccgcctatgcaacttcttatggacagcctcccactggttatactactccaactgccccccaggcatacagccagcctgtccaggggtatggcactggtgcttatgataccaccactgctacagtcaccaccacccaggcctcctatgcagctcagtctgcatatggcactcagcctgcttatccagcctatgggcagcagccagcagccactgcacctacaagaccgcaggatggaaacaagcccactgagactagtcaacctcaatctagcacagggggttacaaccagcccagcctaggatatggacagagtaactacagttatccccaggtacctgggagctaccccatgcagccagtcactgcacctccatcctaccctcctaccagctattcctctacacagccgactagttatgatcagagcagttactctcagcagaacacctatgggcaaccgagcagctatggacagcagagtagctatggtcaacaaagcagctatgggcagcagcctcccactagttacccaccccaaactggatcctacagccaagctccaagtcaatatagccaacagagcagcagctacgggcagcagagttcattccgacaggaccaccccagtagcatgggtgtttatgggcaggagtctggaggattttccggaccaggagagaaccggagcatgagtggccctgataaccggggcaggggaagagggggatttgatcgtggaggcatgagcagaggtgggcggggaggaggacgcggtggaatgggcagcgctggagagcgaggtggcttcaataagcctggtggacccatggatgaaggaccagatcttgatctaggcccacctgtagatccagatgaagactctgacaacagtgcaatttatgtacaaggattaaatgacagtgtgactctagatgatctggcagacttctttaagcagtgtggggttgttaagatgaacaagagaactgggcaacccatgatccacatctacctggacaaggaaacaggaaagcccaaaggcgatgccacagtgtcctatgaagacccacctactgccaaggctgccgtggaatggtttgatgggaaagattttcaagggagcaaacttaaagtctcccttgctcggaagaagcctccaatgaacagtatgcggggtggtctgccaccccgtgagggcagaggcatgccaccaccactccgtggaggtccaggaggcccaggaggtcctgggggacccatgggtcgcatgggaggccgtggaggagatagaggaggcttccctccaagaggaccccggggttcccgagggaacccctctggaggaggaaacgtccagcaccgagctggagactggcagtgtcccaatccgggttgtggaaaccagaacttcgcctggagaacagagtgcaaccagtgtaaggccccaaagcctgaaggcttcctcccgccaccctttccgcccccgggtggtgatcgtggcagaggtggccctggtggcatgcggggaggaagaggtggcctcatggatcgtggtggtcccggtggaatgttcagaggtggccgtggtggagacagaggtggcttccgtggtggccggggcatggaccgaggtggctttggtggaggaagacgaggtggccctggggggccccctggacctttgatggaacaggataaaaaaccgctgaataccctgatctctgctactggtctgtggatgagtcgtaccggaaccattcataaaatcaaacaccacgaggttagccgttcgaaaatctatattgagatggcgtgtggcgatcatctggttgtgaacaatagccgctcttctcgtacagcacgtgcactgcgtcaccacaaatatcgtaaaacctgtaaacgttgccgtgtgtccgatgaggatctgaacaaattcctgacaaaagccaatgaggaccaaacaagcgtgaaagtgaaagtcgttagcgctcctacccgtactaaaaaagcaatgccgaaatccgttgctcgtgcccctaaaccactggaaaacactgaagcagcacaggcacagccgtctggaagcaaattctctccggccattcctgtttctacccaggagtccgtttctgttccagcaagtgtgagcaccagcattagcagtattagcaccggtgccaccgctagcgccctggttaaaggcaataccaatccgattacaagcatgtctgccccggttcaagcatcagctccagcactgacaaaatcccaaaccgatcgtctggaggttctgctgaatccgaaagacgaaatcagcctgaattccggcaaaccgtttcgtgaactggagagcgaactgctgtcacgtcgtaaaaaagacctgcaacaaatctatgccgaagaacgtgagaactatctggggaaactggaacgtgaaatcacccgctttttcgtggatcgtggctttctggagatcaaatccccgattctgattcctctggagtatatcgagcgtatgggcatcgacaatgataccgaactgagcaaacaaattttccgtgtggataaaaacttctgtctgcgccctatgctagcaccaaatctggctaactatctgcgcaaactggaccgtgccctgcctgatcctatcaaaatcttcgagatcggcccgtgttatcgtaaagagtccgacggtaaagaacatctggaggagtttaccatgctgaacttttgccaaatgggttcaggttgtactcgtgagaacctggaaagcatcatcaccgattttctgaaccacctgggcattgacttcaaaattgtgggcgacagctgtatggtgtttggcgacaccctggatgtcatgcacggcgacctggaactgtctagtgccgttgtgggcccaatcccgctggatcgtgagtggggtatcgacaaaccttggatcggtgcgggttttggtctggagcgtctgctgaaagtaaaacacgacttcaagaacatcaaacgtgctgcacgttccgagtcctattacaatggtatttctactaacctgtaa

SEQ ID NO: 506 - protein, 2256 aa, Artificial Sequence
  Description of Artificial Sequence: Synthetic polypeptide
  LCK::FUS::SYNZIP1::MCP::PylRS(AF)::EWSR1::PylRS(AF)
MGCVCSSNPEGTELASNDYTQQATQSYGAYPTQPGQGYSQQSSQPYGQQSYSGYSQSTDTSGYGQSSYSSYGQSQNTGYGTQSTPQGYGSTGGYGSSQSSQSSYGQQSSYPGYGQQPAPSSTSGSYGSSSQSSSYGQPQSGSYSQQPSYGGQQQSYGQQQSYNPPQGYGQQNQYNSSSGGGGGGGGGGNYGQDQSSMSSGGGSGGGYGNQDQSGGGGSGGYGQQDRGGRGRGGSGGGGGGGGGGYNRSSGGYEPRGRGGGRGGRGGMGGSDRGGFNKFGGPRDQGSRHDSEQDNSDNNTIFVQGLGENVTIESVADYFKQIGIIKTNKKTGQPMINLYTDRETGKLKGEATVSFDDPPSAKAAIDWFDGKEFSGNPIKVSFATRRADFNRGGGNGRGGRGRGGPMGRGGYGGGGSGGGGRGGFPSGGGGGGGQQRAGDWKCPNPTCENMNFSWRNECNQCKAPKPDGPGGGPGGSHMGGNYGDDRRGGRGGAIANLVAQLENEVASLENENETLKKKNLHKKDLIAYLEKEIANLRKKIEEASIYPYDVPDYAGAPGSAGSAAGSGASNFTQFVLVDNGGTGDVTVAPSNFANGIAEWISSNSRSQAYKVTCSVRQSSAQNRKYTIKVEVPKGAWRSYLNMELTIPIFATNSDCELIVKAMQGLLKDGNPIPSAIAANSGIYGADYKDDDDKGAPGSAGSAAGSGACPVPLQLPPLERLTLDDKKPLNTLISATGLWMSRTGTIHKIKHHEVSRSKIYIEMACGDHLVVNNSRSSRTARALRHHKYRKTCKRCRVSDEDLNKFLTKANEDQTSVKVKVVSAPTRTKKAMPKSVARAPKPLENTEAAQAQPSGSKFSPAIPVSTQESVSVPASVSTSISSISTGATASALVKGNTNPITSMSAPVQASAPALTKSQTDRLEVLLNPKDEISLNSGKPFRELESELLSRRKKDLQQIYAEERENYLGKLEREITRFFVDRGFLEIKSPILIPLEYIERMGIDNDTELSKQIFRVDKNFCLRPMLAPNLANYLRKLDRALPDPIKIFEIGPCYRKESDGKEHLEEFTMLNFCQMGSGCTRENLESIITDFLNHLGIDFKIVGDSCMVFGDTLDVMHGDLELSSAVVGPIPLDREWGIDKPWIGAGFGLERLLKVKHDFKNIKRAARSESYYNGISTNLMASTDYSTYSQAAAQQGYSAYTAQPTQGYAQTTQAYGQQSYGTYGQPTDVSYTQAQTTATYGQTAYATSYGQPPTGYTTPTAPQAYSQPVQGYGTGAYDTTTATVTTTQASYAAQSAYGTQPAYPAYGQQPAATAPTRPQDGNKPTETSQPQSSTGGYNQPSLGYGQSNYSYPQVPGSYPMQPVTAPPSYPPTSYSSTQPTSYDQSSYSQQNTYGQPSSYGQQSSYGQQSSYGQQPPTSYPPQTGSYSQAPSQYSQQSSSYGQQSSFRQDHPSSMGVYGQESGGFSGPGENRSMSGPDNRGRGRGGFDRGGMSRGGRGGGRGGMGSAGERGGFNKPGGPMDEGPDLDLGPPVDPDEDSDNSAIYVQGLNDSVTLDDLADFFKQCGVVKMNKRTGQPMIHIYLDKETGKPKGDATVSYEDPPTAKAAVEWFDGKDFQGSKLKVSLARKKPPMNSMRGGLPPREGRGMPPPLRGGPGGPGGPGGPMGRMGGRGGDRGGFPPRGPRGSRGNPSGGGNVQHRAGDWQCPNPGCGNQNFAWRTECNQCKAPKPEGFLPPPFPPPGGDRGRGGPGGMRGGRGGLMDRGGPGGMFRGGRGGDRGGFRGGRGMDRGGFGGGRRGGPGGPPGPLMEQDKKPLNTLISATGLWMSRTGTIHKIKHHEVSRSKIYIEMACGDHLVVNNSRSSRTARALRHHKYRKTCKRCRVSDEDLNKFLTKANEDQTSVKVKVVSAPTRTKKAMPKSVARAPKPLENTEAAQAQPSGSKFSPAIPVSTQESVSVPASVSTSISSISTGATASALVKGNTNPITSMSAPVQASAPALTKSQTDRLEVLLNPKDEISLNSGKPFRELESELLSRRKKDLQQIYAEERENYLGKLEREITRFFVDRGFLEIKSPILIPLEYIERMGIDNDTELSKQIFRVDKNFCLRPMLAPNLANYLRKLDRALPDPIKIFEIGPCYRKESDGKEHLEEFTMLNFCQMGSGCTRENLESIITDFLNHLGIDFKIVGDSCMVFGDTLDVMHGDLELSSAVVGPIPLDREWGIDKPWIGAGFGLERLLKVKHDFKNIKRAARSESYYNGISTNL

SEQ ID NO: 507 - DNA, 6780 bp, Artificial Sequence
  Description of Artificial Sequence: Synthetic polynucleotide
  LCK::FUS::SYNZIP2::MCP::PylRS(AF)::EWSR1::PylRS(AF)
atgggctgcgtgtgcagcagcaaccccgagggtaccgagctcgcctcaaacgattatacccaacaagcaacccaaagctatggggcctaccccacccagcccgggcagggctattcccagcagagcagtcagccctacggacagcagagttacagtggttatagccagtccacggacacttcaggatatggccagagcagctattcttcttatggccagagccagaacacaggctatggaactcagtcaactccccagggatatggctcgactggcggctatggcagtagccagagctcccaatcgtcttacgggcagcagtcctcctaccctggctatggccagcagccagctcccagcagcacctcgggaagttacggtagcagttctcagagcagcagctatgggcagccccagagtgggagctacagccagcagcctagctatggtggacagcagcaaagctatggacagcagcaaagctataatccccctcagggctatggacagcagaaccagtacaacagcagcagtggtggtggaggtggaggtggaggtggaggtaactatggccaagatcaatcctccatgagtagtggtggtggcagtggtggcggttatggcaatcaagaccagagtggtggaggtggcagcggtggctatggacagcaggaccgtggaggccgcggcaggggtggcagtggtggcggcggcggcggcggcggtggtggttacaaccgcagcagtggtggctatgaacccagaggtcgtggaggtggccgtggaggcagaggtggcatgggcggaagtgaccgtggtggcttcaataaatttggtggccctcgggaccaaggatcacgtcatgactccgaacaggataattcagacaacaacaccatctttgtgcaaggcctgggtgagaatgttacaattgagtctgtggctgattacttcaagcagattggtattattaagacaaacaagaaaacgggacagcccatgattaatttgtacacagacagggaaactggcaagctgaagggagaggcaacggtctcttttgatgacccaccttcagctaaagcagctattgactggtttgatggtaaagaattctccggaaatcctatcaaggtctcatttgctactcgccgggcagactttaatcggggtggtggcaatggtcgtggaggccgagggcgaggaggacccatgggccgtggaggctatggaggtggtggcagtggtggtggtggccgaggaggatttcccagtggaggtggtggcggtggaggacagcagcgagctggtgactggaagtgtcctaatcccacctgtgagaatatgaacttctcttggaggaatgaatgcaaccagtgtaaggcccctaaaccagatggcccaggagggggaccaggtggctctcacatggggggtaactacggggatgatcgtcgtggtggcagaggaggcgcgatcgcagctagaaacgcctacctgagaaagaaaatcgccagactgaagaaggacaacctgcagctggaaagagacgagcagaacctggaaaagatcatcgccaacctcagagatgagatcgccagactggaaaacgaggtggccagccacgagcaggcatcgatatatccctatgatgtgccggattatgctggagcaccaggaagtgctggttctgctgctggtagtggagcttctaactttactcagttcgttctcgtcgacaatggcggaactggcgacgtgactgtcgccccaagcaacttcgctaacgggatcgctgaatggatcagctctaactcgcgttcacaggcttacaaagtaacctgtagcgttcgtcagagctctgcgcagaatcgcaaatacaccatcaaagtcgaggtgcctaaaggcgcctggcgttcgtacttaaatatggaactaaccattccaattttcgccacgaattccgactgcgagcttattgttaaggcaatgcaaggtctcctaaaagatggaaacccgattccctcagcaatcgcagcaaactccggcatctacggcgccgattacaaggacgatgatgacaagggagcaccaggaagtgctggttctgctgctggtagtggagcgtgcccggtgccgctgcagctgccgccgctggaacgcctgaccctggatgataaaaaaccgctgaataccctgatctctgctactggtctgtggatgagtcgtaccggaaccattcataaaatcaaacaccacgaggttagccgttcgaaaatctatattgagatggcgtgtggcgatcatctggttgtgaacaatagccgctcttctcgtacagcacgtgcactgcgtcaccacaaatatcgtaaaacctgtaaacgttgccgtgtgtccgatgaggatctgaacaaattcctgacaaaagccaatgaggaccaaacaagcgtgaaagtgaaagtcgttagcgctcctacccgtactaaaaaagcaatgccgaaatccgttgctcgtgcccctaaaccactggaaaacactgaagcagcacaggcacagccgtctggaagcaaattctctccggccattcctgtttctacccaggagtccgtttctgttccagcaagtgtgagcaccagcattagcagtattagcaccggtgccaccgctagcgccctggttaaaggcaataccaatccgattacaagcatgtctgccccggttcaagcatcagctccagcactgacaaaatcccaaaccgatcgtctggaggttctgctgaatccgaaagacgaaatcagcctgaattccggcaaaccgtttcgtgaactggagagcgaactgctgtcacgtcgtaaaaaagacctgcaacaaatctatgccgaagaacgtgagaactatctggggaaactggaacgtgaaatcacccgctttttcgtggatcgtggctttctggagatcaaatccccgattctgattcctctggagtatatcgagcgtatgggcatcgacaatgataccgaactgagcaaacaaattttccgtgtggataaaaacttctgtctgcgccctatgctagcaccaaatctggctaactatctgcgcaaactggaccgtgccctgcctgatcctatcaaaatcttcgagatcggcccgtgttatcgtaaagagtccgacggtaaagaacatctggaggagtttaccatgctgaacttttgccaaatgggttcaggttgtactcgtgagaacctggaaagcatcatcaccgattttctgaaccacctgggcattgacttcaaaattgtgggcgacagctgtatggtgtttggcgacaccctggatgtcatgcacggcgacctggaactgtctagtgccgttgtgggcccaatcccgctggatcgtgagtggggtatcgacaaaccttggatcggtgcgggttttggtctggagcgtctgctgaaagtaaaacacgacttcaagaacatcaaacgtgctgcacgttccgagtcctattacaatggtatttctactaacctgatggcgtccacggattacagtacctatagccaagctgcagcgcagcagggctacagtgcttacaccgcccagcccactcaaggatatgcacagaccacccaggcatatgggcaacaaagctatggaacctatggacagcccactgatgtcagctatacccaggctcagaccactgcaacctatgggcagaccgcctatgcaacttcttatggacagcctcccactggttatactactccaactgccccccaggcatacagccagcctgtccaggggtatggcactggtgcttatgataccaccactgctacagtcaccaccacccaggcctcctatgcagctcagtctgcatatggcactcagcctgcttatccagcctatgggcagcagccagcagccactgcacctacaagaccgcaggatggaaacaagcccactgagactagtcaacctcaatctagcacagggggttacaaccagcccagcctaggatatggacagagtaactacagttatccccaggtacctgggagctaccccatgcagccagtcactgcacctccatcctaccctcctaccagctattcctctacacagccgactagttatgatcagagcagttactctcagcagaacacctatgggcaaccgagcagctatggacagcagagtagctatggtcaacaaagcagctatgggcagcagcctcccactagttacccaccccaaactggatcctacagccaagctccaagtcaatatagccaacagagcagcagctacgggcagcagagttcattccgacaggaccaccccagtagcatgggtgtttatgggcaggagtctggaggattttccggaccaggagagaaccggagcatgagtggccctgataaccggggcaggggaagagggggatttgatcgtggaggcatgagcagaggtgggcggggaggaggacgcggtggaatgggcagcgctggagagcgaggtggcttcaataagcctggtggacccatggatgaaggaccagatcttgatctaggcccacctgtagatccagatgaagactctgacaacagtgcaatttatgtacaaggattaaatgacagtgtgactctagatgatctggcagacttctttaagcagtgtggggttgttaagatgaacaagagaactgggcaacccatgatccacatctacctggacaaggaaacaggaaagcccaaaggcgatgccacagtgtcctatgaagacccacctactgccaaggctgccgtggaatggtttgatgggaaagattttcaagggagcaaacttaaagtctcccttgctcggaagaagcctccaatgaacagtatgcggggtggtctgccaccccgtgagggcagaggcatgccaccaccactccgtggaggtccaggaggcccaggaggtcctgggggacccatgggtcgcatgggaggccgtggaggagatagaggaggcttccctccaagaggaccccggggttcccgagggaacccctctggaggaggaaacgtccagcaccgagctggagactggcagtgtcccaatccgggttgtggaaaccagaacttcgcctggagaacagagtgcaaccagtgtaaggccccaaagcctgaaggcttcctcccgccaccctttccgcccccgggtggtgatcgtggcagaggtggccctggtggcatgcggggaggaagaggtggcctcatggatcgtggtggtcccggtggaatgttcagaggtggccgtggtggagacagaggtggcttccgtggtggccggggcatggaccgaggtggctttggtggaggaagacgaggtggccctggggggccccctggacctttgatggaacaggataaaaaaccgctgaataccctgatctctgctactggtctgtggatgagtcgtaccggaaccattcataaaatcaaacaccacgaggttagccgttcgaaaatctatattgagatggcgtgtggcgatcatctggttgtgaacaatagccgctcttctcgtacagcacgtgcactgcgtcaccacaaatatcgtaaaacctgtaaacgttgccgtgtgtccgatgaggatctgaacaaattcctgacaaaagccaatgaggaccaaacaagcgtgaaagtgaaagtcgttagcgctcctacccgtactaaaaaagcaatgccgaaatccgttgctcgtgcccctaaaccactggaaaacactgaagcagcacaggcacagccgtctggaagcaaattctctccggccattcctgtttctacccaggagtccgtttctgttccagcaagtgtgagcaccagcattagcagtattagcaccggtgccaccgctagcgccctggttaaaggcaataccaatccgattacaagcatgtctgccccggttcaagcatcagctccagcactgacaaaatcccaaaccgatcgtctggaggttctgctgaatccgaaagacgaaatcagcctgaattccggcaaaccgtttcgtgaactggagagcgaactgctgtcacgtcgtaaaaaagacctgcaacaaatctatgccgaagaacgtgagaactatctggggaaactggaacgtgaaatcacccgctttttcgtggatcgtggctttctggagatcaaatccccgattctgattcctctggagtatatcgagcgtatgggcatcgacaatgataccgaactgagcaaacaaattttccgtgtggataaaaacttctgtctgcgccctatgctagcaccaaatctggctaactatctgcgcaaactggaccgtgccctgcctgatcctatcaaaatcttcgagatcggcccgtgttatcgtaaagagtccgacggtaaagaacatctggaggagtttaccatgctgaacttttgccaaatgggttcaggttgtactcgtgagaacctggaaagcatcatcaccgattttctgaaccacctgggcattgacttcaaaattgtgggcgacagctgtatggtgtttggcgacaccctggatgtcatgcacggcgacctggaactgtctagtgccgttgtgggcccaatcccgctggatcgtgagtggggtatcgacaaaccttggatcggtgcgggttttggtctggagcgtctgctgaaagtaaaacacgacttcaagaacatcaaacgtgctgcacgttccgagtcctattacaatggtatttctactaacctgtaa

SEQ ID NO: 508 - protein, 2259 aa, Artificial Sequence
  Description of Artificial Sequence: Synthetic polypeptide
  LCK::FUS::SYNZIP2::MCP::PylRS(AF)::EWSR1::PylRS(AF)
MGCVCSSNPEGTELASNDYTQQATQSYGAYPTQPGQGYSQQSSQPYGQQSYSGYSQSTDTSGYGQSSYSSYGQSQNTGYGTQSTPQGYGSTGGYGSSQSSQSSYGQQSSYPGYGQQPAPSSTSGSYGSSSQSSSYGQPQSGSYSQQPSYGGQQQSYGQQQSYNPPQGYGQQNQYNSSSGGGGGGGGGGNYGQDQSSMSSGGGSGGGYGNQDQSGGGGSGGYGQQDRGGRGRGGSGGGGGGGGGGYNRSSGGYEPRGRGGGRGGRGGMGGSDRGGFNKFGGPRDQGSRHDSEQDNSDNNTIFVQGLGENVTIESVADYFKQIGIIKTNKKTGQPMINLYTDRETGKLKGEATVSFDDPPSAKAAIDWFDGKEFSGNPIKVSFATRRADFNRGGGNGRGGRGRGGPMGRGGYGGGGSGGGGRGGFPSGGGGGGGQQRAGDWKCPNPTCENMNFSWRNECNQCKAPKPDGPGGGPGGSHMGGNYGDDRRGGRGGAIAARNAYLRKKIARLKKDNLQLERDEQNLEKIIANLRDEIARLENEVASHEQASIYPYDVPDYAGAPGSAGSAAGSGASNFTQFVLVDNGGTGDVTVAPSNFANGIAEWISSNSRSQAYKVTCSVRQSSAQNRKYTIKVEVPKGAWRSYLNMELTIPIFATNSDCELIVKAMQGLLKDGNPIPSAIAANSGIYGADYKDDDDKGAPGSAGSAAGSGACPVPLQLPPLERLTLDDKKPLNTLISATGLWMSRTGTIHKIKHHEVSRSKIYIEMACGDHLVVNNSRSSRTARALRHHKYRKTCKRCRVSDEDLNKFLTKANEDQTSVKVKVVSAPTRTKKAMPKSVARAPKPLENTEAAQAQPSGSKFSPAIPVSTQESVSVPASVSTSISSISTGATASALVKGNTNPITSMSAPVQASAPALTKSQTDRLEVLLNPKDEISLNSGKPFRELESELLSRRKKDLQQIYAEERENYLGKLEREITRFFVDRGFLEIKSPILIPLEYIERMGIDNDTELSKQIFRVDKNFCLRPMLAPNLANYLRKLDRALPDPIKIFEIGPCYRKESDGKEHLEEFTMLNFCQMGSGCTRENLESIITDFLNHLGIDFKIVGDSCMVFGDTLDVMHGDLELSSAVVGPIPLDREWGIDKPWIGAGFGLERLLKVKHDFKNIKRAARSESYYNGISTNLMASTDYSTYSQAAAQQGYSAYTAQPTQGYAQTTQAYGQQSYGTYGQPTDVSYTQAQTTATYGQTAYATSYGQPPTGYTTPTAPQAYSQPVQGYGTGAYDTTTATVTTTQASYAAQSAYGTQPAYPAYGQQPAATAPTRPQDGNKPTETSQPQSSTGGYNQPSLGYGQSNYSYPQVPGSYPMQPVTAPPSYPPTSYSSTQPTSYDQSSYSQQNTYGQPSSYGQQSSYGQQSSYGQQPPTSYPPQTGSYSQAPSQYSQQSSSYGQQSSFRQDHPSSMGVYGQESGGFSGPGENRSMSGPDNRGRGRGGFDRGGMSRGGRGGGRGGMGSAGERGGFNKPGGPMDEGPDLDLGPPVDPDEDSDNSAIYVQGLNDSVTLDDLADFFKQCGVVKMNKRTGQPMIHIYLDKETGKPKGDATVSYEDPPTAKAAVEWFDGKDFQGSKLKVSLARKKPPMNSMRGGLPPREGRGMPPPLRGGPGGPGGPGGPMGRMGGRGGDRGGFPPRGPRGSRGNPSGGGNVQHRAGDWQCPNPGCGNQNFAWRTECNQCKAPKPEGFLPPPFPPPGGDRGRGGPGGMRGGRGGLMDRGGPGGMFRGGRGGDRGGFRGGRGMDRGGFGGGRRGGPGGPPGPLMEQDKKPLNTLISATGLWMSRTGTIHKIKHHEVSRSKIYIEMACGDHLVVNNSRSSRTARALRHHKYRKTCKRCRVSDEDLNKFLTKANEDQTSVKVKVVSAPTRTKKAMPKSVARAPKPLENTEAAQAQPSGSKFSPAIPVSTQESVSVPASVSTSISSISTGATASALVKGNTNPITSMSAPVQASAPALTKSQTDRLEVLLNPKDEISLNSGKPFRELESELLSRRKKDLQQIYAEERENYLGKLEREITRFFVDRGFLEIKSPILIPLEYIERMGIDNDTELSKQIFRVDKNFCLRPMLAPNLANYLRKLDRALPDPIKIFEIGPCYRKESDGKEHLEEFTMLNFCQMGSGCTRENLESIITDFLNHLGIDFKIVGDSCMVFGDTLDVMHGDLELSSAVVGPIPLDREWGIDKPWIGAGFGLERLLKVKHDFKNIKRAARSESYYNGISTNL

SEQ ID NO: 509 - DNA, 4698 bp, Artificial Sequence
  Description of Artificial Sequence: Synthetic polynucleotide
  LCK::PylRS(AA)::EWSR1::PylRS(AA
atgggctgcgtgtgcagcagcaaccccgagggtaccgagctcgcgtgcccggtgccgctgcagctgccgccgctggaacgcctgaccctggatgataaaaaaccgctgaataccctgatctctgctactggtctgtggatgagtcgtaccggaaccattcataaaatcaaacaccacgaggttagccgttcgaaaatctatattgagatggcgtgtggcgatcatctggttgtgaacaatagccgctcttctcgtacagcacgtgcactgcgtcaccacaaatatcgtaaaacctgtaaacgttgccgtgtgtccgatgaggatctgaacaaattcctgacaaaagccaatgaggaccaaacaagcgtgaaagtgaaagtcgttagcgctcctacccgtactaaaaaagcaatgccgaaatccgttgctcgtgcccctaaaccactggaaaacactgaagcagcacaggcacagccgtctggaagcaaattctctccggccattcctgtttctacccaggagtccgtttctgttccagcaagtgtgagcaccagcattagcagtattagcaccggtgccaccgctagcgccctggttaaaggcaataccaatccgattacaagcatgtctgccccggttcaagcatcagctccagcactgacaaaatcccaaaccgatcgtctggaggttctgctgaatccgaaagacgaaatcagcctgaattccggcaaaccgtttcgtgaactggagagcgaactgctgtcacgtcgtaaaaaagacctgcaacaaatctatgccgaagaacgtgagaactatctggggaaactggaacgtgaaatcacccgctttttcgtggatcgtggctttctggagatcaaatccccgattctgattcctctggagtatatcgagcgtatgggcatcgacaatgataccgaactgagcaaacaaattttccgtgtggataaaaacttctgtctgcgccctatgctggcaccaaatctgtataactatctgcgcaaactggaccgtgccctgcctgatcctatcaaaatcttcgagatcggcccgtgttatcgtaaagagtccgacggtaaagaacatctggaggagtttaccatgctggcctttgcccaaatgggttcaggttgtactcgtgagaacctggaaagcatcatcaccgattttctgaaccacctgggcattgacttcaaaattgtgggcgacagctgtatggtgtatggcgacaccctggatgtcatgcacggcgacctggaactgtctagtgccgttgttggaccaattccgctggaccgtgagtggggtatcgacaaaccgtggatcggagcaggattcggtctggaacgcctgctgaaagtgaaacacgacttcaaaaacatcaaacgtgccgcccgttctgaatcgtattataacgggatctctacgaacctgatggcgtccacggattacagtacctatagccaagctgcagcgcagcagggctacagtgcttacaccgcccagcccactcaaggatatgcacagaccacccaggcatatgggcaacaaagctatggaacctatggacagcccactgatgtcagctatacccaggctcagaccactgcaacctatgggcagaccgcctatgcaacttcttatggacagcctcccactggttatactactccaactgccccccaggcatacagccagcctgtccaggggtatggcactggtgcttatgataccaccactgctacagtcaccaccacccaggcctcctatgcagctcagtctgcatatggcactcagcctgcttatccagcctatgggcagcagccagcagccactgcacctacaagaccgcaggatggaaacaagcccactgagactagtcaacctcaatctagcacagggggttacaaccagcccagcctaggatatggacagagtaactacagttatccccaggtacctgggagctaccccatgcagccagtcactgcacctccatcctaccctcctaccagctattcctctacacagccgactagttatgatcagagcagttactctcagcagaacacctatgggcaaccgagcagctatggacagcagagtagctatggtcaacaaagcagctatgggcagcagcctcccactagttacccaccccaaactggatcctacagccaagctccaagtcaatatagccaacagagcagcagctacgggcagcagagttcattccgacaggaccaccccagtagcatgggtgtttatgggcaggagtctggaggattttccggaccaggagagaaccggagcatgagtggccctgataaccggggcaggggaagagggggatttgatcgtggaggcatgagcagaggtgggcggggaggaggacgcggtggaatgggcagcgctggagagcgaggtggcttcaataagcctggtggacccatggatgaaggaccagatcttgatctaggcccacctgtagatccagatgaagactctgacaacagtgcaatttatgtacaaggattaaatgacagtgtgactctagatgatctggcagacttctttaagcagtgtggggttgttaagatgaacaagagaactgggcaacccatgatccacatctacctggacaaggaaacaggaaagcccaaaggcgatgccacagtgtcctatgaagacccacctactgccaaggctgccgtggaatggtttgatgggaaagattttcaagggagcaaacttaaagtctcccttgctcggaagaagcctccaatgaacagtatgcggggtggtctgccaccccgtgagggcagaggcatgccaccaccactccgtggaggtccaggaggcccaggaggtcctgggggacccatgggtcgcatgggaggccgtggaggagatagaggaggcttccctccaagaggaccccggggttcccgagggaacccctctggaggaggaaacgtccagcaccgagctggagactggcagtgtcccaatccgggttgtggaaaccagaacttcgcctggagaacagagtgcaaccagtgtaaggccccaaagcctgaaggcttcctcccgccaccctttccgcccccgggtggtgatcgtggcagaggtggccctggtggcatgcggggaggaagaggtggcctcatggatcgtggtggtcccggtggaatgttcagaggtggccgtggtggagacagaggtggcttccgtggtggccggggcatggaccgaggtggctttggtggaggaagacgaggtggccctggggggccccctggacctttgatggaacaggataaaaaaccgctgaataccctgatctctgctactggtctgtggatgagtcgtaccggaaccattcataaaatcaaacaccacgaggttagccgttcgaaaatctatattgagatggcgtgtggcgatcatctggttgtgaacaatagccgctcttctcgtacagcacgtgcactgcgtcaccacaaatatcgtaaaacctgtaaacgttgccgtgtgtccgatgaggatctgaacaaattcctgacaaaagccaatgaggaccaaacaagcgtgaaagtgaaagtcgttagcgctcctacccgtactaaaaaagcaatgccgaaatccgttgctcgtgcccctaaaccactggaaaacactgaagcagcacaggcacagccgtctggaagcaaattctctccggccattcctgtttctacccaggagtccgtttctgttccagcaagtgtgagcaccagcattagcagtattagcaccggtgccaccgctagcgccctggttaaaggcaataccaatccgattacaagcatgtctgccccggttcaagcatcagctccagcactgacaaaatcccaaaccgatcgtctggaggttctgctgaatccgaaagacgaaatcagcctgaattccggcaaaccgtttcgtgaactggagagcgaactgctgtcacgtcgtaaaaaagacctgcaacaaatctatgccgaagaacgtgagaactatctggggaaactggaacgtgaaatcacccgctttttcgtggatcgtggctttctggagatcaaatccccgattctgattcctctggagtatatcgagcgtatgggcatcgacaatgataccgaactgagcaaacaaattttccgtgtggataaaaacttctgtctgcgccctatgctggcaccaaatctgtataactatctgcgcaaactggaccgtgccctgcctgatcctatcaaaatcttcgagatcggcccgtgttatcgtaaagagtccgacggtaaagaacatctggaggagtttaccatgctggcctttgcccaaatgggttcaggttgtactcgtgagaacctggaaagcatcatcaccgattttctgaaccacctgggcattgacttcaaaattgtgggcgacagctgtatggtgtatggcgacaccctggatgtcatgcacggcgacctggaactgtctagtgccgttgttggaccaattccgctggaccgtgagtggggtatcgacaaaccgtggatcggagcaggattcggtctggaacgcctgctgaaagtgaaacacgacttcaaaaacatcaaacgtgccgcccgttctgaatcgtattataacgggatctctacgaacctgtaa

SEQ ID NO: 510 - protein, 1565 aa, Artificial Sequence
  Description of Artificial Sequence: Synthetic polypeptide
  LCK::PylRS(AA)::EWSR1::PylRS(AA
MGCVCSSNPEGTELACPVPLQLPPLERLTLDDKKPLNTLISATGLWMSRTGTIHKIKHHEVSRSKIYIEMACGDHLVVNNSRSSRTARALRHHKYRKTCKRCRVSDEDLNKFLTKANEDQTSVKVKVVSAPTRTKKAMPKSVARAPKPLENTEAAQAQPSGSKFSPAIPVSTQESVSVPASVSTSISSISTGATASALVKGNTNPITSMSAPVQASAPALTKSQTDRLEVLLNPKDEISLNSGKPFRELESELLSRRKKDLQQIYAEERENYLGKLEREITRFFVDRGFLEIKSPILIPLEYIERMGIDNDTELSKQIFRVDKNFCLRPMLAPNLYNYLRKLDRALPDPIKIFEIGPCYRKESDGKEHLEEFTMLAFAQMGSGCTRENLESIITDFLNHLGIDFKIVGDSCMVYGDTLDVMHGDLELSSAVVGPIPLDREWGIDKPWIGAGFGLERLLKVKHDFKNIKRAARSESYYNGISTNLMASTDYSTYSQAAAQQGYSAYTAQPTQGYAQTTQAYGQQSYGTYGQPTDVSYTQAQTTATYGQTAYATSYGQPPTGYTTPTAPQAYSQPVQGYGTGAYDTTTATVTTTQASYAAQSAYGTQPAYPAYGQQPAATAPTRPQDGNKPTETSQPQSSTGGYNQPSLGYGQSNYSYPQVPGSYPMQPVTAPPSYPPTSYSSTQPTSYDQSSYSQQNTYGQPSSYGQQSSYGQQSSYGQQPPTSYPPQTGSYSQAPSQYSQQSSSYGQQSSFRQDHPSSMGVYGQESGGFSGPGENRSMSGPDNRGRGRGGFDRGGMSRGGRGGGRGGMGSAGERGGFNKPGGPMDEGPDLDLGPPVDPDEDSDNSAIYVQGLNDSVTLDDLADFFKQCGVVKMNKRTGQPMIHIYLDKETGKPKGDATVSYEDPPTAKAAVEWFDGKDFQGSKLKVSLARKKPPMNSMRGGLPPREGRGMPPPLRGGPGGPGGPGGPMGRMGGRGGDRGGFPPRGPRGSRGNPSGGGNVQHRAGDWQCPNPGCGNQNFAWRTECNQCKAPKPEGFLPPPFPPPGGDRGRGGPGGMRGGRGGLMDRGGPGGMFRGGRGGDRGGFRGGRGMDRGGFGGGRRGGPGGPPGPLMEQDKKPLNTLISATGLWMSRTGTIHKIKHHEVSRSKIYIEMACGDHLVVNNSRSSRTARALRHHKYRKTCKRCRVSDEDLNKFLTKANEDQTSVKVKVVSAPTRTKKAMPKSVARAPKPLENTEAAQAQPSGSKFSPAIPVSTQESVSVPASVSTSISSISTGATASALVKGNTNPITSMSAPVQASAPALTKSQTDRLEVLLNPKDEISLNSGKPFRELESELLSRRKKDLQQIYAEERENYLGKLEREITRFFVDRGFLEIKSPILIPLEYIERMGIDNDTELSKQIFRVDKNFCLRPMLAPNLYNYLRKLDRALPDPIKIFEIGPCYRKESDGKEHLEEFTMLAFAQMGSGCTRENLESIITDFLNHLGIDFKIVGDSCMVYGDTLDVMHGDLELSSAVVGPIPLDREWGIDKPWIGAGFGLERLLKVKHDFKNIKRAARSESYYNGISTNL

SEQ ID NO: 511 - DNA, 6171 bp, Artificial Sequence
  Description of Artificial Sequence: Synthetic polynucleotide
  LCK::FUS::PylRS(AA)::EWSR1::PylRS(AA)
atgggctgcgtgtgcagcagcaaccccgagggtaccgagctcgcctcaaacgattatacccaacaagcaacccaaagctatggggcctaccccacccagcccgggcagggctattcccagcagagcagtcagccctacggacagcagagttacagtggttatagccagtccacggacacttcaggatatggccagagcagctattcttcttatggccagagccagaacacaggctatggaactcagtcaactccccagggatatggctcgactggcggctatggcagtagccagagctcccaatcgtcttacgggcagcagtcctcctaccctggctatggccagcagccagctcccagcagcacctcgggaagttacggtagcagttctcagagcagcagctatgggcagccccagagtgggagctacagccagcagcctagctatggtggacagcagcaaagctatggacagcagcaaagctataatccccctcagggctatggacagcagaaccagtacaacagcagcagtggtggtggaggtggaggtggaggtggaggtaactatggccaagatcaatcctccatgagtagtggtggtggcagtggtggcggttatggcaatcaagaccagagtggtggaggtggcagcggtggctatggacagcaggaccgtggaggccgcggcaggggtggcagtggtggcggcggcggcggcggcggtggtggttacaaccgcagcagtggtggctatgaacccagaggtcgtggaggtggccgtggaggcagaggtggcatgggcggaagtgaccgtggtggcttcaataaatttggtggccctcgggaccaaggatcacgtcatgactccgaacaggataattcagacaacaacaccatctttgtgcaaggcctgggtgagaatgttacaattgagtctgtggctgattacttcaagcagattggtattattaagacaaacaagaaaacgggacagcccatgattaatttgtacacagacagggaaactggcaagctgaagggagaggcaacggtctcttttgatgacccaccttcagctaaagcagctattgactggtttgatggtaaagaattctccggaaatcctatcaaggtctcatttgctactcgccgggcagactttaatcggggtggtggcaatggtcgtggaggccgagggcgaggaggacccatgggccgtggaggctatggaggtggtggcagtggtggtggtggccgaggaggatttcccagtggaggtggtggcggtggaggacagcagcgagctggtgactggaagtgtcctaatcccacctgtgagaatatgaacttctcttggaggaatgaatgcaaccagtgtaaggcccctaaaccagatggcccaggagggggaccaggtggctctcacatggggggtaactacggggatgatcgtcgtggtggcagaggaggcggcgcccccggctccgccggctccgccgccggctccggcatggcgtgcccggtgccgctgcagctgccgccgctggaacgcctgaccctggatgataaaaaaccgctgaataccctgatctctgctactggtctgtggatgagtcgtaccggaaccattcataaaatcaaacaccacgaggttagccgttcgaaaatctatattgagatggcgtgtggcgatcatctggttgtgaacaatagccgctcttctcgtacagcacgtgcactgcgtcaccacaaatatcgtaaaacctgtaaacgttgccgtgtgtccgatgaggatctgaacaaattcctgacaaaagccaatgaggaccaaacaagcgtgaaagtgaaagtcgttagcgctcctacccgtactaaaaaagcaatgccgaaatccgttgctcgtgcccctaaaccactggaaaacactgaagcagcacaggcacagccgtctggaagcaaattctctccggccattcctgtttctacccaggagtccgtttctgttccagcaagtgtgagcaccagcattagcagtattagcaccggtgccaccgctagcgccctggttaaaggcaataccaatccgattacaagcatgtctgccccggttcaagcatcagctccagcactgacaaaatcccaaaccgatcgtctggaggttctgctgaatccgaaagacgaaatcagcctgaattccggcaaaccgtttcgtgaactggagagcgaactgctgtcacgtcgtaaaaaagacctgcaacaaatctatgccgaagaacgtgagaactatctggggaaactggaacgtgaaatcacccgctttttcgtggatcgtggctttctggagatcaaatccccgattctgattcctctggagtatatcgagcgtatgggcatcgacaatgataccgaactgagcaaacaaattttccgtgtggataaaaacttctgtctgcgccctatgctggcaccaaatctgtataactatctgcgcaaactggaccgtgccctgcctgatcctatcaaaatcttcgagatcggcccgtgttatcgtaaagagtccgacggtaaagaacatctggaggagtttaccatgctggcctttgcccaaatgggttcaggttgtactcgtgagaacctggaaagcatcatcaccgattttctgaaccacctgggcattgacttcaaaattgtgggcgacagctgtatggtgtatggcgacaccctggatgtcatgcacggcgacctggaactgtctagtgccgttgttggaccaattccgctggaccgtgagtggggtatcgacaaaccgtggatcggagcaggattcggtctggaacgcctgctgaaagtgaaacacgacttcaaaaacatcaaacgtgccgcccgttctgaatcgtattataacgggatctctacgaacctgatggcgtccacggattacagtacctatagccaagctgcagcgcagcagggctacagtgcttacaccgcccagcccactcaaggatatgcacagaccacccaggcatatgggcaacaaagctatggaacctatggacagcccactgatgtcagctatacccaggctcagaccactgcaacctatgggcagaccgcctatgcaacttcttatggacagcctcccactggttatactactccaactgccccccaggcatacagccagcctgtccaggggtatggcactggtgcttatgataccaccactgctacagtcaccaccacccaggcctcctatgcagctcagtctgcatatggcactcagcctgcttatccagcctatgggcagcagccagcagccactgcacctacaagaccgcaggatggaaacaagcccactgagactagtcaacctcaatctagcacagggggttacaaccagcccagcctaggatatggacagagtaactacagttatccccaggtacctgggagctaccccatgcagccagtcactgcacctccatcctaccctcctaccagctattcctctacacagccgactagttatgatcagagcagttactctcagcagaacacctatgggcaaccgagcagctatggacagcagagtagctatggtcaacaaagcagctatgggcagcagcctcccactagttacccaccccaaactggatcctacagccaagctccaagtcaatatagccaacagagcagcagctacgggcagcagagttcattccgacaggaccaccccagtagcatgggtgtttatgggcaggagtctggaggattttccggaccaggagagaaccggagcatgagtggccctgataaccggggcaggggaagagggggatttgatcgtggaggcatgagcagaggtgggcggggaggaggacgcggtggaatgggcagcgctggagagcgaggtggcttcaataagcctggtggacccatggatgaaggaccagatcttgatctaggcccacctgtagatccagatgaagactctgacaacagtgcaatttatgtacaaggattaaatgacagtgtgactctagatgatctggcagacttctttaagcagtgtggggttgttaagatgaacaagagaactgggcaacccatgatccacatctacctggacaaggaaacaggaaagcccaaaggcgatgccacagtgtcctatgaagacccacctactgccaaggctgccgtggaatggtttgatgggaaagattttcaagggagcaaacttaaagtctcccttgctcggaagaagcctccaatgaacagtatgcggggtggtctgccaccccgtgagggcagaggcatgccaccaccactccgtggaggtccaggaggcccaggaggtcctgggggacccatgggtcgcatgggaggccgtggaggagatagaggaggcttccctccaagaggaccccggggttcccgagggaacccctctggaggaggaaacgtccagcaccgagctggagactggcagtgtcccaatccgggttgtggaaaccagaacttcgcctggagaacagagtgcaaccagtgtaaggccccaaagcctgaaggcttcctcccgccaccctttccgcccccgggtggtgatcgtggcagaggtggccctggtggcatgcggggaggaagaggtggcctcatggatcgtggtggtcccggtggaatgttcagaggtggccgtggtggagacagaggtggcttccgtggtggccggggcatggaccgaggtggctttggtggaggaagacgaggtggccctggggggccccctggacctttgatggaacaggataaaaaaccgctgaataccctgatctctgctactggtctgtggatgagtcgtaccggaaccattcataaaatcaaacaccacgaggttagccgttcgaaaatctatattgagatggcgtgtggcgatcatctggttgtgaacaatagccgctcttctcgtacagcacgtgcactgcgtcaccacaaatatcgtaaaacctgtaaacgttgccgtgtgtccgatgaggatctgaacaaattcctgacaaaagccaatgaggaccaaacaagcgtgaaagtgaaagtcgttagcgctcctacccgtactaaaaaagcaatgccgaaatccgttgctcgtgcccctaaaccactggaaaacactgaagcagcacaggcacagccgtctggaagcaaattctctccggccattcctgtttctacccaggagtccgtttctgttccagcaagtgtgagcaccagcattagcagtattagcaccggtgccaccgctagcgccctggttaaaggcaataccaatccgattacaagcatgtctgccccggttcaagcatcagctccagcactgacaaaatcccaaaccgatcgtctggaggttctgctgaatccgaaagacgaaatcagcctgaattccggcaaaccgtttcgtgaactggagagcgaactgctgtcacgtcgtaaaaaagacctgcaacaaatctatgccgaagaacgtgagaactatctggggaaactggaacgtgaaatcacccgctttttcgtggatcgtggctttctggagatcaaatccccgattctgattcctctggagtatatcgagcgtatgggcatcgacaatgataccgaactgagcaaacaaattttccgtgtggataaaaacttctgtctgcgccctatgctggcaccaaatctgtataactatctgcgcaaactggaccgtgccctgcctgatcctatcaaaatcttcgagatcggcccgtgttatcgtaaagagtccgacggtaaagaacatctggaggagtttaccatgctggcctttgcccaaatgggttcaggttgtactcgtgagaacctggaaagcatcatcaccgattttctgaaccacctgggcattgacttcaaaattgtgggcgacagctgtatggtgtatggcgacaccctggatgtcatgcacggcgacctggaactgtctagtgccgttgttggaccaattccgctggaccgtgagtggggtatcgacaaaccgtggatcggagcaggattcggtctggaacgcctgctgaaagtgaaacacgacttcaaaaacatcaaacgtgccgcccgttctgaatcgtattataacgggatctctacgaacctgtaa

SEQ ID NO: 512 - protein, 2056 aa, Artificial Sequence
  Description of Artificial Sequence: Synthetic polypeptide
  LCK::FUS::PylRS(AA)::EWSR1::PylRS(AA)
MGCVCSSNPEGTELASNDYTQQATQSYGAYPTQPGQGYSQQSSQPYGQQSYSGYSQSTDTSGYGQSSYSSYGQSQNTGYGTQSTPQGYGSTGGYGSSQSSQSSYGQQSSYPGYGQQPAPSSTSGSYGSSSQSSSYGQPQSGSYSQQPSYGGQQQSYGQQQSYNPPQGYGQQNQYNSSSGGGGGGGGGGNYGQDQSSMSSGGGSGGGYGNQDQSGGGGSGGYGQQDRGGRGRGGSGGGGGGGGGGYNRSSGGYEPRGRGGGRGGRGGMGGSDRGGFNKFGGPRDQGSRHDSEQDNSDNNTIFVQGLGENVTIESVADYFKQIGIIKTNKKTGQPMINLYTDRETGKLKGEATVSFDDPPSAKAAIDWFDGKEFSGNPIKVSFATRRADFNRGGGNGRGGRGRGGPMGRGGYGGGGSGGGGRGGFPSGGGGGGGQQRAGDWKCPNPTCENMNFSWRNECNQCKAPKPDGPGGGPGGSHMGGNYGDDRRGGRGGGAPGSAGSAAGSGMACPVPLQLPPLERLTLDDKKPLNTLISATGLWMSRTGTIHKIKHHEVSRSKIYIEMACGDHLVVNNSRSSRTARALRHHKYRKTCKRCRVSDEDLNKFLTKANEDQTSVKVKVVSAPTRTKKAMPKSVARAPKPLENTEAAQAQPSGSKFSPAIPVSTQESVSVPASVSTSISSISTGATASALVKGNTNPITSMSAPVQASAPALTKSQTDRLEVLLNPKDEISLNSGKPFRELESELLSRRKKDLQQIYAEERENYLGKLEREITRFFVDRGFLEIKSPILIPLEYIERMGIDNDTELSKQIFRVDKNFCLRPMLAPNLYNYLRKLDRALPDPIKIFEIGPCYRKESDGKEHLEEFTMLAFAQMGSGCTRENLESIITDFLNHLGIDFKIVGDSCMVYGDTLDVMHGDLELSSAVVGPIPLDREWGIDKPWIGAGFGLERLLKVKHDFKNIKRAARSESYYNGISTNLMASTDYSTYSQAAAQQGYSAYTAQPTQGYAQTTQAYGQQSYGTYGQPTDVSYTQAQTTATYGQTAYATSYGQPPTGYTTPTAPQAYSQPVQGYGTGAYDTTTATVTTTQASYAAQSAYGTQPAYPAYGQQPAATAPTRPQDGNKPTETSQPQSSTGGYNQPSLGYGQSNYSYPQVPGSYPMQPVTAPPSYPPTSYSSTQPTSYDQSSYSQQNTYGQPSSYGQQSSYGQQSSYGQQPPTSYPPQTGSYSQAPSQYSQQSSSYGQQSSFRQDHPSSMGVYGQESGGFSGPGENRSMSGPDNRGRGRGGFDRGGMSRGGRGGGRGGMGSAGERGGFNKPGGPMDEGPDLDLGPPVDPDEDSDNSAIYVQGLNDSVTLDDLADFFKQCGVVKMNKRTGQPMIHIYLDKETGKPKGDATVSYEDPPTAKAAVEWFDGKDFQGSKLKVSLARKKPPMNSMRGGLPPREGRGMPPPLRGGPGGPGGPGGPMGRMGGRGGDRGGFPPRGPRGSRGNPSGGGNVQHRAGDWQCPNPGCGNQNFAWRTECNQCKAPKPEGFLPPPFPPPGGDRGRGGPGGMRGGRGGLMDRGGPGGMFRGGRGGDRGGFRGGRGMDRGGFGGGRRGGPGGPPGPLMEQDKKPLNTLISATGLWMSRTGTIHKIKHHEVSRSKIYIEMACGDHLVVNNSRSSRTARALRHHKYRKTCKRCRVSDEDLNKFLTKANEDQTSVKVKVVSAPTRTKKAMPKSVARAPKPLENTEAAQAQPSGSKFSPAIPVSTQESVSVPASVSTSISSISTGATASALVKGNTNPITSMSAPVQASAPALTKSQTDRLEVLLNPKDEISLNSGKPFRELESELLSRRKKDLQQIYAEERENYLGKLEREITRFFVDRGFLEIKSPILIPLEYIERMGIDNDTELSKQIFRVDKNFCLRPMLAPNLYNYLRKLDRALPDPIKIFEIGPCYRKESDGKEHLEEFTMLAFAQMGSGCTRENLESIITDFLNHLGIDFKIVGDSCMVYGDTLDVMHGDLELSSAVVGPIPLDREWGIDKPWIGAGFGLERLLKVKHDFKNIKRAARSESYYNGISTNL

SEQ ID NO: 513 - DNA, 6390 bp, Artificial Sequence
  Description of Artificial Sequence: Synthetic polynucleotide
  TOM20::FUS::PylRS(AA)::EWSR1::PylRS(AA)
atggtgggtcggaacagcgccatcgccgccggtgtatgcggggcccttttcattgggtactgcatctacttcgaccgcaaaagacgaagtgaccccaacttcaagaacaggcttcgagaacgaagaaagaaacagaagcttgccaaggagagagctgggctttccaagttacctgaccttaaagatgctgaagctgttcagaaattcttcatggcctcaaacgattatacccaacaagcaacccaaagctatggggcctaccccacccagcccgggcagggctattcccagcagagcagtcagccctacggacagcagagttacagtggttatagccagtccacggacacttcaggatatggccagagcagctattcttcttatggccagagccagaacacaggctatggaactcagtcaactccccagggatatggctcgactggcggctatggcagtagccagagctcccaatcgtcttacgggcagcagtcctcctaccctggctatggccagcagccagctcccagcagcacctcgggaagttacggtagcagttctcagagcagcagctatgggcagccccagagtgggagctacagccagcagcctagctatggtggacagcagcaaagctatggacagcagcaaagctataatccccctcagggctatggacagcagaaccagtacaacagcagcagtggtggtggaggtggaggtggaggtggaggtaactatggccaagatcaatcctccatgagtagtggtggtggcagtggtggcggttatggcaatcaagaccagagtggtggaggtggcagcggtggctatggacagcaggaccgtggaggccgcggcaggggtggcagtggtggcggcggcggcggcggcggtggtggttacaaccgcagcagtggtggctatgaacccagaggtcgtggaggtggccgtggaggcagaggtggcatgggcggaagtgaccgtggtggcttcaataaatttggtggccctcgggaccaaggatcacgtcatgactccgaacaggataattcagacaacaacaccatctttgtgcaaggcctgggtgagaatgttacaattgagtctgtggctgattacttcaagcagattggtattattaagacaaacaagaaaacgggacagcccatgattaatttgtacacagacagggaaactggcaagctgaagggagaggcaacggtctcttttgatgacccaccttcagctaaagcagctattgactggtttgatggtaaagaattctccggaaatcctatcaaggtctcatttgctactcgccgggcagactttaatcggggtggtggcaatggtcgtggaggccgagggcgaggaggacccatgggccgtggaggctatggaggtggtggcagtggtggtggtggccgaggaggatttcccagtggaggtggtggcggtggaggacagcagcgagctggtgactggaagtgtcctaatcccacctgtgagaatatgaacttctcttggaggaatgaatgcaaccagtgtaaggcccctaaaccagatggcccaggagggggaccaggtggctctcacatggggggtaactacggggatgatcgtcgtggtggcagaggaggcgcgatcgcaggcaagcctattcccaaccccctgctgggcctggatagcaccggagcaccaggaagtgctggttctgctgctggtagtggagcgtgcccggtgccgctgcagctgccgccgctggaacgcctgaccctggatgataaaaaaccgctgaataccctgatctctgctactggtctgtggatgagtcgtaccggaaccattcataaaatcaaacaccacgaggttagccgttcgaaaatctatattgagatggcgtgtggcgatcatctggttgtgaacaatagccgctcttctcgtacagcacgtgcactgcgtcaccacaaatatcgtaaaacctgtaaacgttgccgtgtgtccgatgaggatctgaacaaattcctgacaaaagccaatgaggaccaaacaagcgtgaaagtgaaagtcgttagcgctcctacccgtactaaaaaagcaatgccgaaatccgttgctcgtgcccctaaaccactggaaaacactgaagcagcacaggcacagccgtctggaagcaaattctctccggccattcctgtttctacccaggagtccgtttctgttccagcaagtgtgagcaccagcattagcagtattagcaccggtgccaccgctagcgccctggttaaaggcaataccaatccgattacaagcatgtctgccccggttcaagcatcagctccagcactgacaaaatcccaaaccgatcgtctggaggttctgctgaatccgaaagacgaaatcagcctgaattccggcaaaccgtttcgtgaactggagagcgaactgctgtcacgtcgtaaaaaagacctgcaacaaatctatgccgaagaacgtgagaactatctggggaaactggaacgtgaaatcacccgctttttcgtggatcgtggctttctggagatcaaatccccgattctgattcctctggagtatatcgagcgtatgggcatcgacaatgataccgaactgagcaaacaaattttccgtgtggataaaaacttctgtctgcgccctatgctggcaccaaatctgtataactatctgcgcaaactggaccgtgccctgcctgatcctatcaaaatcttcgagatcggcccgtgttatcgtaaagagtccgacggtaaagaacatctggaggagtttaccatgctggcctttgcccaaatgggttcaggttgtactcgtgagaacctggaaagcatcatcaccgattttctgaaccacctgggcattgacttcaaaattgtgggcgacagctgtatggtgtatggcgacaccctggatgtcatgcacggcgacctggaactgtctagtgccgttgttggaccaattccgctggaccgtgagtggggtatcgacaaaccgtggatcggagcaggattcggtctggaacgcctgctgaaagtgaaacacgacttcaaaaacatcaaacgtgccgcccgttctgaatcgtattataacgggatctctacgaacctgatggcgtccacggattacagtacctatagccaagctgcagcgcagcagggctacagtgcttacaccgcccagcccactcaaggatatgcacagaccacccaggcatatgggcaacaaagctatggaacctatggacagcccactgatgtcagctatacccaggctcagaccactgcaacctatgggcagaccgcctatgcaacttcttatggacagcctcccactggttatactactccaactgccccccaggcatacagccagcctgtccaggggtatggcactggtgcttatgataccaccactgctacagtcaccaccacccaggcctcctatgcagctcagtctgcatatggcactcagcctgcttatccagcctatgggcagcagccagcagccactgcacctacaagaccgcaggatggaaacaagcccactgagactagtcaacctcaatctagcacagggggttacaaccagcccagcctaggatatggacagagtaactacagttatccccaggtacctgggagctaccccatgcagccagtcactgcacctccatcctaccctcctaccagctattcctctacacagccgactagttatgatcagagcagttactctcagcagaacacctatgggcaaccgagcagctatggacagcagagtagctatggtcaacaaagcagctatgggcagcagcctcccactagttacccaccccaaactggatcctacagccaagctccaagtcaatatagccaacagagcagcagctacgggcagcagagttcattccgacaggaccaccccagtagcatgggtgtttatgggcaggagtctggaggattttccggaccaggagagaaccggagcatgagtggccctgataaccggggcaggggaagagggggatttgatcgtggaggcatgagcagaggtgggcggggaggaggacgcggtggaatgggcagcgctggagagcgaggtggcttcaataagcctggtggacccatggatgaaggaccagatcttgatctaggcccacctgtagatccagatgaagactctgacaacagtgcaatttatgtacaaggattaaatgacagtgtgactctagatgatctggcagacttctttaagcagtgtggggttgttaagatgaacaagagaactgggcaacccatgatccacatctacctggacaaggaaacaggaaagcccaaaggcgatgccacagtgtcctatgaagacccacctactgccaaggctgccgtggaatggtttgatgggaaagattttcaagggagcaaacttaaagtctcccttgctcggaagaagcctccaatgaacagtatgcggggtggtctgccaccccgtgagggcagaggcatgccaccaccactccgtggaggtccaggaggcccaggaggtcctgggggacccatgggtcgcatgggaggccgtggaggagatagaggaggcttccctccaagaggaccccggggttcccgagggaacccctctggaggaggaaacgtccagcaccgagctggagactggcagtgtcccaatccgggttgtggaaaccagaacttcgcctggagaacagagtgcaaccagtgtaaggccccaaagcctgaaggcttcctcccgccaccctttccgcccccgggtggtgatcgtggcagaggtggccctggtggcatgcggggaggaagaggtggcctcatggatcgtggtggtcccggtggaatgttcagaggtggccgtggtggagacagaggtggcttccgtggtggccggggcatggaccgaggtggctttggtggaggaagacgaggtggccctggggggccccctggacctttgatggaacaggataaaaaaccgctgaataccctgatctctgctactggtctgtggatgagtcgtaccggaaccattcataaaatcaaacaccacgaggttagccgttcgaaaatctatattgagatggcgtgtggcgatcatctggttgtgaacaatagccgctcttctcgtacagcacgtgcactgcgtcaccacaaatatcgtaaaacctgtaaacgttgccgtgtgtccgatgaggatctgaacaaattcctgacaaaagccaatgaggaccaaacaagcgtgaaagtgaaagtcgttagcgctcctacccgtactaaaaaagcaatgccgaaatccgttgctcgtgcccctaaaccactggaaaacactgaagcagcacaggcacagccgtctggaagcaaattctctccggccattcctgtttctacccaggagtccgtttctgttccagcaagtgtgagcaccagcattagcagtattagcaccggtgccaccgctagcgccctggttaaaggcaataccaatccgattacaagcatgtctgccccggttcaagcatcagctccagcactgacaaaatcccaaaccgatcgtctggaggttctgctgaatccgaaagacgaaatcagcctgaattccggcaaaccgtttcgtgaactggagagcgaactgctgtcacgtcgtaaaaaagacctgcaacaaatctatgccgaagaacgtgagaactatctggggaaactggaacgtgaaatcacccgctttttcgtggatcgtggctttctggagatcaaatccccgattctgattcctctggagtatatcgagcgtatgggcatcgacaatgataccgaactgagcaaacaaattttccgtgtggataaaaacttctgtctgcgccctatgctggcaccaaatctgtataactatctgcgcaaactggaccgtgccctgcctgatcctatcaaaatcttcgagatcggcccgtgttatcgtaaagagtccgacggtaaagaacatctggaggagtttaccatgctggcctttgcccaaatgggttcaggttgtactcgtgagaacctggaaagcatcatcaccgattttctgaaccacctgggcattgacttcaaaattgtgggcgacagctgtatggtgtatggcgacaccctggatgtcatgcacggcgacctggaactgtctagtgccgttgttggaccaattccgctggaccgtgagtggggtatcgacaaaccgtggatcggagcaggattcggtctggaacgcctgctgaaagtgaaacacgacttcaaaaacatcaaacgtgccgcccgttctgaatcgtattataacgggatctctacgaacctgtaa

SEQ ID NO: 514 - protein, 2129 aa, Artificial Sequence
  Description of Artificial Sequence: Synthetic polypeptide
  TOM20::FUS::PylRS(AA)::EWSR1::PylRS(AA)
MVGRNSAIAAGVCGALFIGYCIYFDRKRRSDPNFKNRLRERRKKQKLAKERAGLSKLPDLKDAEAVQKFFMASNDYTQQATQSYGAYPTQPGQGYSQQSSQPYGQQSYSGYSQSTDTSGYGQSSYSSYGQSQNTGYGTQSTPQGYGSTGGYGSSQSSQSSYGQQSSYPGYGQQPAPSSTSGSYGSSSQSSSYGQPQSGSYSQQPSYGGQQQSYGQQQSYNPPQGYGQQNQYNSSSGGGGGGGGGGNYGQDQSSMSSGGGSGGGYGNQDQSGGGGSGGYGQQDRGGRGRGGSGGGGGGGGGGYNRSSGGYEPRGRGGGRGGRGGMGGSDRGGFNKFGGPRDQGSRHDSEQDNSDNNTIFVQGLGENVTIESVADYFKQIGIIKTNKKTGQPMINLYTDRETGKLKGEATVSFDDPPSAKAAIDWFDGKEFSGNPIKVSFATRRADFNRGGGNGRGGRGRGGPMGRGGYGGGGSGGGGRGGFPSGGGGGGGQQRAGDWKCPNPTCENMNFSWRNECNQCKAPKPDGPGGGPGGSHMGGNYGDDRRGGRGGAIAGKPIPNPLLGLDSTGAPGSAGSAAGSGACPVPLQLPPLERLTLDDKKPLNTLISATGLWMSRTGTIHKIKHHEVSRSKIYIEMACGDHLVVNNSRSSRTARALRHHKYRKTCKRCRVSDEDLNKFLTKANEDQTSVKVKVVSAPTRTKKAMPKSVARAPKPLENTEAAQAQPSGSKFSPAIPVSTQESVSVPASVSTSISSISTGATASALVKGNTNPITSMSAPVQASAPALTKSQTDRLEVLLNPKDEISLNSGKPFRELESELLSRRKKDLQQIYAEERENYLGKLEREITRFFVDRGFLEIKSPILIPLEYIERMGIDNDTELSKQIFRVDKNFCLRPMLAPNLYNYLRKLDRALPDPIKIFEIGPCYRKESDGKEHLEEFTMLAFAQMGSGCTRENLESIITDFLNHLGIDFKIVGDSCMVYGDTLDVMHGDLELSSAVVGPIPLDREWGIDKPWIGAGFGLERLLKVKHDFKNIKRAARSESYYNGISTNLMASTDYSTYSQAAAQQGYSAYTAQPTQGYAQTTQAYGQQSYGTYGQPTDVSYTQAQTTATYGQTAYATSYGQPPTGYTTPTAPQAYSQPVQGYGTGAYDTTTATVTTTQASYAAQSAYGTQPAYPAYGQQPAATAPTRPQDGNKPTETSQPQSSTGGYNQPSLGYGQSNYSYPQVPGSYPMQPVTAPPSYPPTSYSSTQPTSYDQSSYSQQNTYGQPSSYGQQSSYGQQSSYGQQPPTSYPPQTGSYSQAPSQYSQQSSSYGQQSSFRQDHPSSMGVYGQESGGFSGPGENRSMSGPDNRGRGRGGFDRGGMSRGGRGGGRGGMGSAGERGGFNKPGGPMDEGPDLDLGPPVDPDEDSDNSAIYVQGLNDSVTLDDLADFFKQCGVVKMNKRTGQPMIHIYLDKETGKPKGDATVSYEDPPTAKAAVEWFDGKDFQGSKLKVSLARKKPPMNSMRGGLPPREGRGMPPPLRGGPGGPGGPGGPMGRMGGRGGDRGGFPPRGPRGSRGNPSGGGNVQHRAGDWQCPNPGCGNQNFAWRTECNQCKAPKPEGFLPPPFPPPGGDRGRGGPGGMRGGRGGLMDRGGPGGMFRGGRGGDRGGFRGGRGMDRGGFGGGRRGGPGGPPGPLMEQDKKPLNTLISATGLWMSRTGTIHKIKHHEVSRSKIYIEMACGDHLVVNNSRSSRTARALRHHKYRKTCKRCRVSDEDLNKFLTKANEDQTSVKVKVVSAPTRTKKAMPKSVARAPKPLENTEAAQAQPSGSKFSPAIPVSTQESVSVPASVSTSISSISTGATASALVKGNTNPITSMSAPVQASAPALTKSQTDRLEVLLNPKDEISLNSGKPFRELESELLSRRKKDLQQIYAEERENYLGKLEREITRFFVDRGFLEIKSPILIPLEYIERMGIDNDTELSKQIFRVDKNFCLRPMLAPNLYNYLRKLDRALPDPIKIFEIGPCYRKESDGKEHLEEFTMLAFAQMGSGCTRENLESIITDFLNHLGIDFKIVGDSCMVYGDTLDVMHGDLELSSAVVGPIPLDREWGIDKPWIGAGFGLERLLKVKHDFKNIKRAARSESYYNGISTNL

SEQ ID NO: 515 - DNA, 6792 bp, Artificial Sequence
  Description of Artificial Sequence: Synthetic polynucleotide
  TOM20::FUS::MCP::PylRS(AA)::EWSR1::PylRS(AA)
atggtgggtcggaacagcgccatcgccgccggtgtatgcggggcccttttcattgggtactgcatctacttcgaccgcaaaagacgaagtgaccccaacttcaagaacaggcttcgagaacgaagaaagaaacagaagcttgccaaggagagagctgggctttccaagttacctgaccttaaagatgctgaagctgttcagaaattcttcatggcctcaaacgattatacccaacaagcaacccaaagctatggggcctaccccacccagcccgggcagggctattcccagcagagcagtcagccctacggacagcagagttacagtggttatagccagtccacggacacttcaggatatggccagagcagctattcttcttatggccagagccagaacacaggctatggaactcagtcaactccccagggatatggctcgactggcggctatggcagtagccagagctcccaatcgtcttacgggcagcagtcctcctaccctggctatggccagcagccagctcccagcagcacctcgggaagttacggtagcagttctcagagcagcagctatgggcagccccagagtgggagctacagccagcagcctagctatggtggacagcagcaaagctatggacagcagcaaagctataatccccctcagggctatggacagcagaaccagtacaacagcagcagtggtggtggaggtggaggtggaggtggaggtaactatggccaagatcaatcctccatgagtagtggtggtggcagtggtggcggttatggcaatcaagaccagagtggtggaggtggcagcggtggctatggacagcaggaccgtggaggccgcggcaggggtggcagtggtggcggcggcggcggcggcggtggtggttacaaccgcagcagtggtggctatgaacccagaggtcgtggaggtggccgtggaggcagaggtggcatgggcggaagtgaccgtggtggcttcaataaatttggtggccctcgggaccaaggatcacgtcatgactccgaacaggataattcagacaacaacaccatctttgtgcaaggcctgggtgagaatgttacaattgagtctgtggctgattacttcaagcagattggtattattaagacaaacaagaaaacgggacagcccatgattaatttgtacacagacagggaaactggcaagctgaagggagaggcaacggtctcttttgatgacccaccttcagctaaagcagctattgactggtttgatggtaaagaattctccggaaatcctatcaaggtctcatttgctactcgccgggcagactttaatcggggtggtggcaatggtcgtggaggccgagggcgaggaggacccatgggccgtggaggctatggaggtggtggcagtggtggtggtggccgaggaggatttcccagtggaggtggtggcggtggaggacagcagcgagctggtgactggaagtgtcctaatcccacctgtgagaatatgaacttctcttggaggaatgaatgcaaccagtgtaaggcccctaaaccagatggcccaggagggggaccaggtggctctcacatggggggtaactacggggatgatcgtcgtggtggcagaggaggcgcgatcgcatatccctatgatgtgccggattatgctggagcaccaggaagtgctggttctgctgctggtagtggagcttctaactttactcagttcgttctcgtcgacaatggcggaactggcgacgtgactgtcgccccaagcaacttcgctaacgggatcgctgaatggatcagctctaactcgcgttcacaggcttacaaagtaacctgtagcgttcgtcagagctctgcgcagaatcgcaaatacaccatcaaagtcgaggtgcctaaaggcgcctggcgttcgtacttaaatatggaactaaccattccaattttcgccacgaattccgactgcgagcttattgttaaggcaatgcaaggtctcctaaaagatggaaacccgattccctcagcaatcgcagcaaactccggcatctacggcgccgattacaaggacgatgatgacaagggagcaccaggaagtgctggttctgctgctggtagtggagcgtgcccggtgccgctgcagctgccgccgctggaacgcctgaccctggatgataaaaaaccgctgaataccctgatctctgctactggtctgtggatgagtcgtaccggaaccattcataaaatcaaacaccacgaggttagccgttcgaaaatctatattgagatggcgtgtggcgatcatctggttgtgaacaatagccgctcttctcgtacagcacgtgcactgcgtcaccacaaatatcgtaaaacctgtaaacgttgccgtgtgtccgatgaggatctgaacaaattcctgacaaaagccaatgaggaccaaacaagcgtgaaagtgaaagtcgttagcgctcctacccgtactaaaaaagcaatgccgaaatccgttgctcgtgcccctaaaccactggaaaacactgaagcagcacaggcacagccgtctggaagcaaattctctccggccattcctgtttctacccaggagtccgtttctgttccagcaagtgtgagcaccagcattagcagtattagcaccggtgccaccgctagcgccctggttaaaggcaataccaatccgattacaagcatgtctgccccggttcaagcatcagctccagcactgacaaaatcccaaaccgatcgtctggaggttctgctgaatccgaaagacgaaatcagcctgaattccggcaaaccgtttcgtgaactggagagcgaactgctgtcacgtcgtaaaaaagacctgcaacaaatctatgccgaagaacgtgagaactatctggggaaactggaacgtgaaatcacccgctttttcgtggatcgtggctttctggagatcaaatccccgattctgattcctctggagtatatcgagcgtatgggcatcgacaatgataccgaactgagcaaacaaattttccgtgtggataaaaacttctgtctgcgccctatgctggcaccaaatctgtataactatctgcgcaaactggaccgtgccctgcctgatcctatcaaaatcttcgagatcggcccgtgttatcgtaaagagtccgacggtaaagaacatctggaggagtttaccatgctggcctttgcccaaatgggttcaggttgtactcgtgagaacctggaaagcatcatcaccgattttctgaaccacctgggcattgacttcaaaattgtgggcgacagctgtatggtgtatggcgacaccctggatgtcatgcacggcgacctggaactgtctagtgccgttgttggaccaattccgctggaccgtgagtggggtatcgacaaaccgtggatcggagcaggattcggtctggaacgcctgctgaaagtgaaacacgacttcaaaaacatcaaacgtgccgcccgttctgaatcgtattataacgggatctctacgaacctgatggcgtccacggattacagtacctatagccaagctgcagcgcagcagggctacagtgcttacaccgcccagcccactcaaggatatgcacagaccacccaggcatatgggcaacaaagctatggaacctatggacagcccactgatgtcagctatacccaggctcagaccactgcaacctatgggcagaccgcctatgcaacttcttatggacagcctcccactggttatactactccaactgccccccaggcatacagccagcctgtccaggggtatggcactggtgcttatgataccaccactgctacagtcaccaccacccaggcctcctatgcagctcagtctgcatatggcactcagcctgcttatccagcctatgggcagcagccagcagccactgcacctacaagaccgcaggatggaaacaagcccactgagactagtcaacctcaatctagcacagggggttacaaccagcccagcctaggatatggacagagtaactacagttatccccaggtacctgggagctaccccatgcagccagtcactgcacctccatcctaccctcctaccagctattcctctacacagccgactagttatgatcagagcagttactctcagcagaacacctatgggcaaccgagcagctatggacagcagagtagctatggtcaacaaagcagctatgggcagcagcctcccactagttacccaccccaaactggatcctacagccaagctccaagtcaatatagccaacagagcagcagctacgggcagcagagttcattccgacaggaccaccccagtagcatgggtgtttatgggcaggagtctggaggattttccggaccaggagagaaccggagcatgagtggccctgataaccggggcaggggaagagggggatttgatcgtggaggcatgagcagaggtgggcggggaggaggacgcggtggaatgggcagcgctggagagcgaggtggcttcaataagcctggtggacccatggatgaaggaccagatcttgatctaggcccacctgtagatccagatgaagactctgacaacagtgcaatttatgtacaaggattaaatgacagtgtgactctagatgatctggcagacttctttaagcagtgtggggttgttaagatgaacaagagaactgggcaacccatgatccacatctacctggacaaggaaacaggaaagcccaaaggcgatgccacagtgtcctatgaagacccacctactgccaaggctgccgtggaatggtttgatgggaaagattttcaagggagcaaacttaaagtctcccttgctcggaagaagcctccaatgaacagtatgcggggtggtctgccaccccgtgagggcagaggcatgccaccaccactccgtggaggtccaggaggcccaggaggtcctgggggacccatgggtcgcatgggaggccgtggaggagatagaggaggcttccctccaagaggaccccggggttcccgagggaacccctctggaggaggaaacgtccagcaccgagctggagactggcagtgtcccaatccgggttgtggaaaccagaacttcgcctggagaacagagtgcaaccagtgtaaggccccaaagcctgaaggcttcctcccgccaccctttccgcccccgggtggtgatcgtggcagaggtggccctggtggcatgcggggaggaagaggtggcctcatggatcgtggtggtcccggtggaatgttcagaggtggccgtggtggagacagaggtggcttccgtggtggccggggcatggaccgaggtggctttggtggaggaagacgaggtggccctggggggccccctggacctttgatggaacaggataaaaaaccgctgaataccctgatctctgctactggtctgtggatgagtcgtaccggaaccattcataaaatcaaacaccacgaggttagccgttcgaaaatctatattgagatggcgtgtggcgatcatctggttgtgaacaatagccgctcttctcgtacagcacgtgcactgcgtcaccacaaatatcgtaaaacctgtaaacgttgccgtgtgtccgatgaggatctgaacaaattcctgacaaaagccaatgaggaccaaacaagcgtgaaagtgaaagtcgttagcgctcctacccgtactaaaaaagcaatgccgaaatccgttgctcgtgcccctaaaccactggaaaacactgaagcagcacaggcacagccgtctggaagcaaattctctccggccattcctgtttctacccaggagtccgtttctgttccagcaagtgtgagcaccagcattagcagtattagcaccggtgccaccgctagcgccctggttaaaggcaataccaatccgattacaagcatgtctgccccggttcaagcatcagctccagcactgacaaaatcccaaaccgatcgtctggaggttctgctgaatccgaaagacgaaatcagcctgaattccggcaaaccgtttcgtgaactggagagcgaactgctgtcacgtcgtaaaaaagacctgcaacaaatctatgccgaagaacgtgagaactatctggggaaactggaacgtgaaatcacccgctttttcgtggatcgtggctttctggagatcaaatccccgattctgattcctctggagtatatcgagcgtatgggcatcgacaatgataccgaactgagcaaacaaattttccgtgtggataaaaacttctgtctgcgccctatgctggcaccaaatctgtataactatctgcgcaaactggaccgtgccctgcctgatcctatcaaaatcttcgagatcggcccgtgttatcgtaaagagtccgacggtaaagaacatctggaggagtttaccatgctggcctttgcccaaatgggttcaggttgtactcgtgagaacctggaaagcatcatcaccgattttctgaaccacctgggcattgacttcaaaattgtgggcgacagctgtatggtgtatggcgacaccctggatgtcatgcacggcgacctggaactgtctagtgccgttgttggaccaattccgctggaccgtgagtggggtatcgacaaaccgtggatcggagcaggattcggtctggaacgcctgctgaaagtgaaacacgacttcaaaaacatcaaacgtgccgcccgttctgaatcgtattataacgggatctctacgaacctgtaa

SEQ ID NO: 516 - protein, 2263 aa, Artificial Sequence
  Description of Artificial Sequence: Synthetic polypeptide
  TOM20::FUS::MCP::PylRS(AA)::EWSR1::PylRS(AA)
MVGRNSAIAAGVCGALFIGYCIYFDRKRRSDPNFKNRLRERRKKQKLAKERAGLSKLPDLKDAEAVQKFFMASNDYTQQATQSYGAYPTQPGQGYSQQSSQPYGQQSYSGYSQSTDTSGYGQSSYSSYGQSQNTGYGTQSTPQGYGSTGGYGSSQSSQSSYGQQSSYPGYGQQPAPSSTSGSYGSSSQSSSYGQPQSGSYSQQPSYGGQQQSYGQQQSYNPPQGYGQQNQYNSSSGGGGGGGGGGNYGQDQSSMSSGGGSGGGYGNQDQSGGGGSGGYGQQDRGGRGRGGSGGGGGGGGGGYNRSSGGYEPRGRGGGRGGRGGMGGSDRGGFNKFGGPRDQGSRHDSEQDNSDNNTIFVQGLGENVTIESVADYFKQIGIIKTNKKTGQPMINLYTDRETGKLKGEATVSFDDPPSAKAAIDWFDGKEFSGNPIKVSFATRRADFNRGGGNGRGGRGRGGPMGRGGYGGGGSGGGGRGGFPSGGGGGGGQQRAGDWKCPNPTCENMNFSWRNECNQCKAPKPDGPGGGPGGSHMGGNYGDDRRGGRGGAIAYPYDVPDYAGAPGSAGSAAGSGASNFTQFVLVDNGGTGDVTVAPSNFANGIAEWISSNSRSQAYKVTCSVRQSSAQNRKYTIKVEVPKGAWRSYLNMELTIPIFATNSDCELIVKAMQGLLKDGNPIPSAIAANSGIYGADYKDDDDKGAPGSAGSAAGSGACPVPLQLPPLERLTLDDKKPLNTLISATGLWMSRTGTIHKIKHHEVSRSKIYIEMACGDHLVVNNSRSSRTARALRHHKYRKTCKRCRVSDEDLNKFLTKANEDQTSVKVKVVSAPTRTKKAMPKSVARAPKPLENTEAAQAQPSGSKFSPAIPVSTQESVSVPASVSTSISSISTGATASALVKGNTNPITSMSAPVQASAPALTKSQTDRLEVLLNPKDEISLNSGKPFRELESELLSRRKKDLQQIYAEERENYLGKLEREITRFFVDRGFLEIKSPILIPLEYIERMGIDNDTELSKQIFRVDKNFCLRPMLAPNLYNYLRKLDRALPDPIKIFEIGPCYRKESDGKEHLEEFTMLAFAQMGSGCTRENLESIITDFLNHLGIDFKIVGDSCMVYGDTLDVMHGDLELSSAVVGPIPLDREWGIDKPWIGAGFGLERLLKVKHDFKNIKRAARSESYYNGISTNLMASTDYSTYSQAAAQQGYSAYTAQPTQGYAQTTQAYGQQSYGTYGQPTDVSYTQAQTTATYGQTAYATSYGQPPTGYTTPTAPQAYSQPVQGYGTGAYDTTTATVTTTQASYAAQSAYGTQPAYPAYGQQPAATAPTRPQDGNKPTETSQPQSSTGGYNQPSLGYGQSNYSYPQVPGSYPMQPVTAPPSYPPTSYSSTQPTSYDQSSYSQQNTYGQPSSYGQQSSYGQQSSYGQQPPTSYPPQTGSYSQAPSQYSQQSSSYGQQSSFRQDHPSSMGVYGQESGGFSGPGENRSMSGPDNRGRGRGGFDRGGMSRGGRGGGRGGMGSAGERGGFNKPGGPMDEGPDLDLGPPVDPDEDSDNSAIYVQGLNDSVTLDDLADFFKQCGVVKMNKRTGQPMIHIYLDKETGKPKGDATVSYEDPPTAKAAVEWFDGKDFQGSKLKVSLARKKPPMNSMRGGLPPREGRGMPPPLRGGPGGPGGPGGPMGRMGGRGGDRGGFPPRGPRGSRGNPSGGGNVQHRAGDWQCPNPGCGNQNFAWRTECNQCKAPKPEGFLPPPFPPPGGDRGRGGPGGMRGGRGGLMDRGGPGGMFRGGRGGDRGGFRGGRGMDRGGFGGGRRGGPGGPPGPLMEQDKKPLNTLISATGLWMSRTGTIHKIKHHEVSRSKIYIEMACGDHLVVNNSRSSRTARALRHHKYRKTCKRCRVSDEDLNKFLTKANEDQTSVKVKVVSAPTRTKKAMPKSVARAPKPLENTEAAQAQPSGSKFSPAIPVSTQESVSVPASVSTSISSISTGATASALVKGNTNPITSMSAPVQASAPALTKSQTDRLEVLLNPKDEISLNSGKPFRELESELLSRRKKDLQQIYAEERENYLGKLEREITRFFVDRGFLEIKSPILIPLEYIERMGIDNDTELSKQIFRVDKNFCLRPMLAPNLYNYLRKLDRALPDPIKIFEIGPCYRKESDGKEHLEEFTMLAFAQMGSGCTRENLESIITDFLNHLGIDFKIVGDSCMVYGDTLDVMHGDLELSSAVVGPIPLDREWGIDKPWIGAGFGLERLLKVKHDFKNIKRAARSESYYNGISTNL

SEQ ID NO: 517 - DNA, 6957 bp, Artificial Sequence
  Description of Artificial Sequence: Synthetic polynucleotide
  TOM20::FUS::4xlambdaN22::PylRS(AA)::EWSR1::PylRS(AA)
atggtgggtcggaacagcgccatcgccgccggtgtatgcggggcccttttcattgggtactgcatctacttcgaccgcaaaagacgaagtgaccccaacttcaagaacaggcttcgagaacgaagaaagaaacagaagcttgccaaggagagagctgggctttccaagttacctgaccttaaagatgctgaagctgttcagaaattcttcatggcctcaaacgattatacccaacaagcaacccaaagctatggggcctaccccacccagcccgggcagggctattcccagcagagcagtcagccctacggacagcagagttacagtggttatagccagtccacggacacttcaggatatggccagagcagctattcttcttatggccagagccagaacacaggctatggaactcagtcaactccccagggatatggctcgactggcggctatggcagtagccagagctcccaatcgtcttacgggcagcagtcctcctaccctggctatggccagcagccagctcccagcagcacctcgggaagttacggtagcagttctcagagcagcagctatgggcagccccagagtgggagctacagccagcagcctagctatggtggacagcagcaaagctatggacagcagcaaagctataatccccctcagggctatggacagcagaaccagtacaacagcagcagtggtggtggaggtggaggtggaggtggaggtaactatggccaagatcaatcctccatgagtagtggtggtggcagtggtggcggttatggcaatcaagaccagagtggtggaggtggcagcggtggctatggacagcaggaccgtggaggccgcggcaggggtggcagtggtggcggcggcggcggcggcggtggtggttacaaccgcagcagtggtggctatgaacccagaggtcgtggaggtggccgtggaggcagaggtggcatgggcggaagtgaccgtggtggcttcaataaatttggtggccctcgggaccaaggatcacgtcatgactccgaacaggataattcagacaacaacaccatctttgtgcaaggcctgggtgagaatgttacaattgagtctgtggctgattacttcaagcagattggtattattaagacaaacaagaaaacgggacagcccatgattaatttgtacacagacagggaaactggcaagctgaagggagaggcaacggtctcttttgatgacccaccttcagctaaagcagctattgactggtttgatggtaaagaattctccggaaatcctatcaaggtctcatttgctactcgccgggcagactttaatcggggtggtggcaatggtcgtggaggccgagggcgaggaggacccatgggccgtggaggctatggaggtggtggcagtggtggtggtggccgaggaggatttcccagtggaggtggtggcggtggaggacagcagcgagctggtgactggaagtgtcctaatcccacctgtgagaatatgaacttctcttggaggaatgaatgcaaccagtgtaaggcccctaaaccagatggcccaggagggggaccaggtggctctcacatggggggtaactacggggatgatcgtcgtggtggcagaggaggcgcgatcgcaggcaagcctattcccaaccccctgctgggcctggatagcaccggagcaccaggaagtgctggttctgctgctggtagtggagcatcgatagagcagaagctgatctcagaggaggacctgctagccaccatggacgcacaaacacgacgacgtgagcgtcgcgctgagaaacaagctcaatggaaagctgcaaacccaccgctcgacggagccggagctggcgctggagctggagccggagctggcggtctagccaccatggacgcacaaacacgacgacgtgagcgtcgcgctgagaaacaagctcaatggaaagctgcaaacccaccgctcgacggagccggagctggcgctggagctggagccggagctggcggtctagccaccatggacgcacaaacacgacgacgtgagcgtcgcgctgagaaacaagctcaatggaaagctgcaaacccaccgctcgacggagccggagctggcgctggagctggagccggagctggcggtctagccaccatggacgcacaaacacgacgacgtgagcgtcgcgctgagaaacaagctcaatggaaagctgcaaacccaccgctcgagtctagagggcccgttggtgctcctggttcagcaggaagcgcagcaggatcaggtgcgtgcccggtgccgctgcagctgccgccgctggaacgcctgaccctggatgacaaaaaaccgctgaataccctgatctctgctactggtctgtggatgagtcgtaccggaaccattcataaaatcaaacaccacgaggttagccgttcgaaaatctatattgagatggcgtgtggcgatcatctggttgtgaacaatagccgctcttctcgtacagcacgtgcactgcgtcaccacaaatatcgtaaaacctgtaaacgttgccgtgtgtccgatgaggatctgaacaaattcctgacaaaagccaatgaggaccaaacaagcgtgaaagtgaaagtcgttagcgctcctacccgtactaaaaaagcaatgccgaaatccgttgctcgtgcccctaaaccactggaaaacactgaagcagcacaggcacagccgtctggaagcaaattctctccggccattcctgtttctacccaggagtccgtttctgttccagcaagtgtgagcaccagcattagcagtattagcaccggtgccaccgctagcgccctggttaaaggcaataccaatccgattacaagcatgtctgccccggttcaagcatcagctccagcactgacaaaatcccaaaccgatcgtctggaggttctgctgaatccgaaagacgaaatcagcctgaattccggcaaaccgtttcgtgaactggagagcgaactgctgtcacgtcgtaaaaaagacctgcaacaaatctatgccgaagaacgtgagaactatctggggaaactggaacgtgaaatcacccgctttttcgtggatcgtggctttctggagatcaaatccccgattctgattcctctggagtatatcgagcgtatgggcatcgacaatgataccgaactgagcaaacaaattttccgtgtggataaaaacttctgtctgcgccctatgctggcaccaaatctgtataactatctgcgcaaactggaccgtgccctgcctgatcctatcaaaatcttcgagatcggcccgtgttatcgtaaagagtccgacggtaaagaacatctggaggagtttaccatgctggcctttgcccaaatgggttcaggttgtactcgtgagaacctggaaagcatcatcaccgattttctgaaccacctgggcattgacttcaaaattgtgggcgacagctgtatggtgtatggcgacaccctggatgtcatgcacggcgacctggaactgtctagtgccgttgttggaccaattccgctggaccgtgagtggggtatcgacaaaccgtggatcggagcaggattcggtctggaacgcctgctgaaagtgaaacacgacttcaaaaacatcaaacgtgccgcccgttctgaatcgtattataacgggatctctacgaacctgatggcgtccacggattacagtacctatagccaagctgcagcgcagcagggctacagtgcttacaccgcccagcccactcaaggatatgcacagaccacccaggcatatgggcaacaaagctatggaacctatggacagcccactgatgtcagctatacccaggctcagaccactgcaacctatgggcagaccgcctatgcaacttcttatggacagcctcccactggttatactactccaactgccccccaggcatacagccagcctgtccaggggtatggcactggtgcttatgataccaccactgctacagtcaccaccacccaggcctcctatgcagctcagtctgcatatggcactcagcctgcttatccagcctatgggcagcagccagcagccactgcacctacaagaccgcaggatggaaacaagcccactgagactagtcaacctcaatctagcacagggggttacaaccagcccagcctaggatatggacagagtaactacagttatccccaggtacctgggagctaccccatgcagccagtcactgcacctccatcctaccctcctaccagctattcctctacacagccgactagttatgatcagagcagttactctcagcagaacacctatgggcaaccgagcagctatggacagcagagtagctatggtcaacaaagcagctatgggcagcagcctcccactagttacccaccccaaactggatcctacagccaagctccaagtcaatatagccaacagagcagcagctacgggcagcagagttcattccgacaggaccaccccagtagcatgggtgtttatgggcaggagtctggaggattttccggaccaggagagaaccggagcatgagtggccctgataaccggggcaggggaagagggggatttgatcgtggaggcatgagcagaggtgggcggggaggaggacgcggtggaatgggcagcgctggagagcgaggtggcttcaataagcctggtggacccatggatgaaggaccagatcttgatctaggcccacctgtagatccagatgaagactctgacaacagtgcaatttatgtacaaggattaaatgacagtgtgactctagatgatctggcagacttctttaagcagtgtggggttgttaagatgaacaagagaactgggcaacccatgatccacatctacctggacaaggaaacaggaaagcccaaaggcgatgccacagtgtcctatgaagacccacctactgccaaggctgccgtggaatggtttgatgggaaagattttcaagggagcaaacttaaagtctcccttgctcggaagaagcctccaatgaacagtatgcggggtggtctgccaccccgtgagggcagaggcatgccaccaccactccgtggaggtccaggaggcccaggaggtcctgggggacccatgggtcgcatgggaggccgtggaggagatagaggaggcttccctccaagaggaccccggggttcccgagggaacccctctggaggaggaaacgtccagcaccgagctggagactggcagtgtcccaatccgggttgtggaaaccagaacttcgcctggagaacagagtgcaaccagtgtaaggccccaaagcctgaaggcttcctcccgccaccctttccgcccccgggtggtgatcgtggcagaggtggccctggtggcatgcggggaggaagaggtggcctcatggatcgtggtggtcccggtggaatgttcagaggtggccgtggtggagacagaggtggcttccgtggtggccggggcatggaccgaggtggctttggtggaggaagacgaggtggccctggggggccccctggacctttgatggaacaggataaaaaaccgctgaataccctgatctctgctactggtctgtggatgagtcgtaccggaaccattcataaaatcaaacaccacgaggttagccgttcgaaaatctatattgagatggcgtgtggcgatcatctggttgtgaacaatagccgctcttctcgtacagcacgtgcactgcgtcaccacaaatatcgtaaaacctgtaaacgttgccgtgtgtccgatgaggatctgaacaaattcctgacaaaagccaatgaggaccaaacaagcgtgaaagtgaaagtcgttagcgctcctacccgtactaaaaaagcaatgccgaaatccgttgctcgtgcccctaaaccactggaaaacactgaagcagcacaggcacagccgtctggaagcaaattctctccggccattcctgtttctacccaggagtccgtttctgttccagcaagtgtgagcaccagcattagcagtattagcaccggtgccaccgctagcgccctggttaaaggcaataccaatccgattacaagcatgtctgccccggttcaagcatcagctccagcactgacaaaatcccaaaccgatcgtctggaggttctgctgaatccgaaagacgaaatcagcctgaattccggcaaaccgtttcgtgaactggagagcgaactgctgtcacgtcgtaaaaaagacctgcaacaaatctatgccgaagaacgtgagaactatctggggaaactggaacgtgaaatcacccgctttttcgtggatcgtggctttctggagatcaaatccccgattctgattcctctggagtatatcgagcgtatgggcatcgacaatgataccgaactgagcaaacaaattttccgtgtggataaaaacttctgtctgcgccctatgctggcaccaaatctgtataactatctgcgcaaactggaccgtgccctgcctgatcctatcaaaatcttcgagatcggcccgtgttatcgtaaagagtccgacggtaaagaacatctggaggagtttaccatgctggcctttgcccaaatgggttcaggttgtactcgtgagaacctggaaagcatcatcaccgattttctgaaccacctgggcattgacttcaaaattgtgggcgacagctgtatggtgtatggcgacaccctggatgtcatgcacggcgacctggaactgtctagtgccgttgttggaccaattccgctggaccgtgagtggggtatcgacaaaccgtggatcggagcaggattcggtctggaacgcctgctgaaagtgaaacacgacttcaaaaacatcaaacgtgccgcccgttctgaatcgtattataacgggatctctacgaacctgtaa

SEQ ID NO: 518 - protein, 2318 aa, Artificial Sequence
  Description of Artificial Sequence: Synthetic polypeptide
  TOM20::FUS::4xlambdaN22::PylRS(AA)::EWSR1::PylRS(AA)
MVGRNSAIAAGVCGALFIGYCIYFDRKRRSDPNFKNRLRERRKKQKLAKERAGLSKLPDLKDAEAVQKFFMASNDYTQQATQSYGAYPTQPGQGYSQQSSQPYGQQSYSGYSQSTDTSGYGQSSYSSYGQSQNTGYGTQSTPQGYGSTGGYGSSQSSQSSYGQQSSYPGYGQQPAPSSTSGSYGSSSQSSSYGQPQSGSYSQQPSYGGQQQSYGQQQSYNPPQGYGQQNQYNSSSGGGGGGGGGGNYGQDQSSMSSGGGSGGGYGNQDQSGGGGSGGYGQQDRGGRGRGGSGGGGGGGGGGYNRSSGGYEPRGRGGGRGGRGGMGGSDRGGFNKFGGPRDQGSRHDSEQDNSDNNTIFVQGLGENVTIESVADYFKQIGIIKTNKKTGQPMINLYTDRETGKLKGEATVSFDDPPSAKAAIDWFDGKEFSGNPIKVSFATRRADFNRGGGNGRGGRGRGGPMGRGGYGGGGSGGGGRGGFPSGGGGGGGQQRAGDWKCPNPTCENMNFSWRNECNQCKAPKPDGPGGGPGGSHMGGNYGDDRRGGRGGAIAGKPIPNPLLGLDSTGAPGSAGSAAGSGASIEQKLISEEDLLATMDAQTRRRERRAEKQAQWKAANPPLDGAGAGAGAGAGAGGLATMDAQTRRRERRAEKQAQWKAANPPLDGAGAGAGAGAGAGGLATMDAQTRRRERRAEKQAQWKAANPPLDGAGAGAGAGAGAGGLATMDAQTRRRERRAEKQAQWKAANPPLESRGPVGAPGSAGSAAGSGACPVPLQLPPLERLTLDDKKPLNTLISATGLWMSRTGTIHKIKHHEVSRSKIYIEMACGDHLVVNNSRSSRTARALRHHKYRKTCKRCRVSDEDLNKFLTKANEDQTSVKVKVVSAPTRTKKAMPKSVARAPKPLENTEAAQAQPSGSKFSPAIPVSTQESVSVPASVSTSISSISTGATASALVKGNTNPITSMSAPVQASAPALTKSQTDRLEVLLNPKDEISLNSGKPFRELESELLSRRKKDLQQIYAEERENYLGKLEREITRFFVDRGFLEIKSPILIPLEYIERMGIDNDTELSKQIFRVDKNFCLRPMLAPNLYNYLRKLDRALPDPIKIFEIGPCYRKESDGKEHLEEFTMLAFAQMGSGCTRENLESIITDFLNHLGIDFKIVGDSCMVYGDTLDVMHGDLELSSAVVGPIPLDREWGIDKPWIGAGFGLERLLKVKHDFKNIKRAARSESYYNGISTNLMASTDYSTYSQAAAQQGYSAYTAQPTQGYAQTTQAYGQQSYGTYGQPTDVSYTQAQTTATYGQTAYATSYGQPPTGYTTPTAPQAYSQPVQGYGTGAYDTTTATVTTTQASYAAQSAYGTQPAYPAYGQQPAATAPTRPQDGNKPTETSQPQSSTGGYNQPSLGYGQSNYSYPQVPGSYPMQPVTAPPSYPPTSYSSTQPTSYDQSSYSQQNTYGQPSSYGQQSSYGQQSSYGQQPPTSYPPQTGSYSQAPSQYSQQSSSYGQQSSFRQDHPSSMGVYGQESGGFSGPGENRSMSGPDNRGRGRGGFDRGGMSRGGRGGGRGGMGSAGERGGFNKPGGPMDEGPDLDLGPPVDPDEDSDNSAIYVQGLNDSVTLDDLADFFKQCGVVKMNKRTGQPMIHIYLDKETGKPKGDATVSYEDPPTAKAAVEWFDGKDFQGSKLKVSLARKKPPMNSMRGGLPPREGRGMPPPLRGGPGGPGGPGGPMGRMGGRGGDRGGFPPRGPRGSRGNPSGGGNVQHRAGDWQCPNPGCGNQNFAWRTECNQCKAPKPEGFLPPPFPPPGGDRGRGGPGGMRGGRGGLMDRGGPGGMFRGGRGGDRGGFRGGRGMDRGGFGGGRRGGPGGPPGPLMEQDKKPLNTLISATGLWMSRTGTIHKIKHHEVSRSKIYIEMACGDHLVVNNSRSSRTARALRHHKYRKTCKRCRVSDEDLNKFLTKANEDQTSVKVKVVSAPTRTKKAMPKSVARAPKPLENTEAAQAQPSGSKFSPAIPVSTQESVSVPASVSTSISSISTGATASALVKGNTNPITSMSAPVQASAPALTKSQTDRLEVLLNPKDEISLNSGKPFRELESELLSRRKKDLQQIYAEERENYLGKLEREITRFFVDRGFLEIKSPILIPLEYIERMGIDNDTELSKQIFRVDKNFCLRPMLAPNLYNYLRKLDRALPDPIKIFEIGPCYRKESDGKEHLEEFTMLAFAQMGSGCTRENLESIITDFLNHLGIDFKIVGDSCMVYGDTLDVMHGDLELSSAVVGPIPLDREWGIDKPWIGAGFGLERLLKVKHDFKNIKRAARSESYYNGISTNL

SEQ ID NO: 519 - DNA, 6594 bp, Artificial Sequence
  Description of Artificial Sequence: Synthetic polynucleotide
  LCK::EWSR1::MCP::PylRS(AF)::FUS::PylRS(AF)
atgggctgcgtgtgcagcagcaaccccgagggtaccgagctcatggcgtccacggattacagtacctatagccaagctgcagcgcagcagggctacagtgcttacaccgcccagcccactcaaggatatgcacagaccacccaggcatatgggcaacaaagctatggaacctatggacagcccactgatgtcagctatacccaggctcagaccactgcaacctatgggcagaccgcctatgcaacttcttatggacagcctcccactggttatactactccaactgccccccaggcatacagccagcctgtccaggggtatggcactggtgcttatgataccaccactgctacagtcaccaccacccaggcctcctatgcagctcagtctgcatatggcactcagcctgcttatccagcctatgggcagcagccagcagccactgcacctacaagaccgcaggatggaaacaagcccactgagactagtcaacctcaatctagcacagggggttacaaccagcccagcctaggatatggacagagtaactacagttatccccaggtacctgggagctaccccatgcagccagtcactgcacctccatcctaccctcctaccagctattcctctacacagccgactagttatgatcagagcagttactctcagcagaacacctatgggcaaccgagcagctatggacagcagagtagctatggtcaacaaagcagctatgggcagcagcctcccactagttacccaccccaaactggatcctacagccaagctccaagtcaatatagccaacagagcagcagctacgggcagcagagttcattccgacaggaccaccccagtagcatgggtgtttatgggcaggagtctggaggattttccggaccaggagagaaccggagcatgagtggccctgataaccggggcaggggaagagggggatttgatcgtggaggcatgagcagaggtgggcggggaggaggacgcggtggaatgggcagcgctggagagcgaggtggcttcaataagcctggtggacccatggatgaaggaccagatcttgatctaggcccacctgtagatccagatgaagactctgacaacagtgcaatttatgtacaaggattaaatgacagtgtgactctagatgatctggcagacttctttaagcagtgtggggttgttaagatgaacaagagaactgggcaacccatgatccacatctacctggacaaggaaacaggaaagcccaaaggcgatgccacagtgtcctatgaagacccacctactgccaaggctgccgtggaatggtttgatgggaaagattttcaagggagcaaacttaaagtctcccttgctcggaagaagcctccaatgaacagtatgcggggtggtctgccaccccgtgagggcagaggcatgccaccaccactccgtggaggtccaggaggcccaggaggtcctgggggacccatgggtcgcatgggaggccgtggaggagatagaggaggcttccctccaagaggaccccggggttcccgagggaacccctctggaggaggaaacgtccagcaccgagctggagactggcagtgtcccaatccgggttgtggaaaccagaacttcgcctggagaacagagtgcaaccagtgtaaggccccaaagcctgaaggcttcctcccgccaccctttccgcccccgggtggtgatcgtggcagaggtggccctggtggcatgcggggaggaagaggtggcctcatggatcgtggtggtcccggtggaatgttcagaggtggccgtggtggagacagaggtggcttccgtggtggccggggcatggaccgaggtggctttggtggaggaagacgaggtggccctggggggccccctggacctttgatggaacaggcgatcgcatatccctatgatgtgccggattatgctggagcaccaggaagtgctggttctgctgctggtagtggagcttctaactttactcagttcgttctcgtcgacaatggcggaactggcgacgtgactgtcgccccaagcaacttcgctaacgggatcgctgaatggatcagctctaactcgcgttcacaggcttacaaagtaacctgtagcgttcgtcagagctctgcgcagaatcgcaaatacaccatcaaagtcgaggtgcctaaaggcgcctggcgttcgtacttaaatatggaactaaccattccaattttcgccacgaattccgactgcgagcttattgttaaggcaatgcaaggtctcctaaaagatggaaacccgattccctcagcaatcgcagcaaactccggcatctacgggctaagctatacagatattgaaatgaacagattgggaaaggcgtgcccggtgccgctgcagctgccgccgctggaacgcctgaccctggatgataaaaaaccgctgaataccctgatctctgctactggtctgtggatgagtcgtaccggaaccattcataaaatcaaacaccacgaggttagccgttcgaaaatctatattgagatggcgtgtggcgatcatctggttgtgaacaatagccgctcttctcgtacagcacgtgcactgcgtcaccacaaatatcgtaaaacctgtaaacgttgccgtgtgtccgatgaggatctgaacaaattcctgacaaaagccaatgaggaccaaacaagcgtgaaagtgaaagtcgttagcgctcctacccgtactaaaaaagcaatgccgaaatccgttgctcgtgcccctaaaccactggaaaacactgaagcagcacaggcacagccgtctggaagcaaattctctccggccattcctgtttctacccaggagtccgtttctgttccagcaagtgtgagcaccagcattagcagtattagcaccggtgccaccgctagcgccctggttaaaggcaataccaatccgattacaagcatgtctgccccggttcaagcatcagctccagcactgacaaaatcccaaaccgatcgtctggaggttctgctgaatccgaaagacgaaatcagcctgaattccggcaaaccgtttcgtgaactggagagcgaactgctgtcacgtcgtaaaaaagacctgcaacaaatctatgccgaagaacgtgagaactatctggggaaactggaacgtgaaatcacccgctttttcgtggatcgtggctttctggagatcaaatccccgattctgattcctctggagtatatcgagcgtatgggcatcgacaatgataccgaactgagcaaacaaattttccgtgtggataaaaacttctgtctgcgccctatgctagcaccaaatctggctaactatctgcgcaaactggaccgtgccctgcctgatcctatcaaaatcttcgagatcggcccgtgttatcgtaaagagtccgacggtaaagaacatctggaggagtttaccatgctgaacttttgccaaatgggttcaggttgtactcgtgagaacctggaaagcatcatcaccgattttctgaaccacctgggcattgacttcaaaattgtgggcgacagctgtatggtgtttggcgacaccctggatgtcatgcacggcgacctggaactgtctagtgccgttgtgggcccaatcccgctggatcgtgagtggggtatcgacaaaccttggatcggtgcgggttttggtctggagcgtctgctgaaagtaaaacacgacttcaagaacatcaaacgtgctgcacgttccgagtcctattacaatggtatttctactaacctggcctcaaacgattatacccaacaagcaacccaaagctatggggcctaccccacccagcccgggcagggctattcccagcagagcagtcagccctacggacagcagagttacagtggttatagccagtccacggacacttcaggatatggccagagcagctattcttcttatggccagagccagaacacaggctatggaactcagtcaactccccagggatatggctcgactggcggctatggcagtagccagagctcccaatcgtcttacgggcagcagtcctcctaccctggctatggccagcagccagctcccagcagcacctcgggaagttacggtagcagttctcagagcagcagctatgggcagccccagagtgggagctacagccagcagcctagctatggtggacagcagcaaagctatggacagcagcaaagctataatccccctcagggctatggacagcagaaccagtacaacagcagcagtggtggtggaggtggaggtggaggtggaggtaactatggccaagatcaatcctccatgagtagtggtggtggcagtggtggcggttatggcaatcaagaccagagtggtggaggtggcagcggtggctatggacagcaggaccgtggaggccgcggcaggggtggcagtggtggcggcggcggcggcggcggtggtggttacaaccgcagcagtggtggctatgaacccagaggtcgtggaggtggccgtggaggcagaggtggcatgggcggaagtgaccgtggtggcttcaataaatttggtggccctcgggaccaaggatcacgtcatgactccgaacaggataattcagacaacaacaccatctttgtgcaaggcctgggtgagaatgttacaattgagtctgtggctgattacttcaagcagattggtattattaagacaaacaagaaaacgggacagcccatgattaatttgtacacagacagggaaactggcaagctgaagggagaggcaacggtctcttttgatgacccaccttcagctaaagcagctattgactggtttgatggtaaagaattctccggaaatcctatcaaggtctcatttgctactcgccgggcagactttaatcggggtggtggcaatggtcgtggaggccgagggcgaggaggacccatgggccgtggaggctatggaggtggtggcagtggtggtggtggccgaggaggatttcccagtggaggtggtggcggtggaggacagcagcgagctggtgactggaagtgtcctaatcccacctgtgagaatatgaacttctcttggaggaatgaatgcaaccagtgtaaggcccctaaaccagatggcccaggagggggaccaggtggctctcacatggggggtaactacggggatgatcgtcgtggtggcagaggaggcgataaaaaaccgctgaataccctgatctctgctactggtctgtggatgagtcgtaccggaaccattcataaaatcaaacaccacgaggttagccgttcgaaaatctatattgagatggcgtgtggcgatcatctggttgtgaacaatagccgctcttctcgtacagcacgtgcactgcgtcaccacaaatatcgtaaaacctgtaaacgttgccgtgtgtccgatgaggatctgaacaaattcctgacaaaagccaatgaggaccaaacaagcgtgaaagtgaaagtcgttagcgctcctacccgtactaaaaaagcaatgccgaaatccgttgctcgtgcccctaaaccactggaaaacactgaagcagcacaggcacagccgtctggaagcaaattctctccggccattcctgtttctacccaggagtccgtttctgttccagcaagtgtgagcaccagcattagcagtattagcaccggtgccaccgctagcgccctggttaaaggcaataccaatccgattacaagcatgtctgccccggttcaagcatcagctccagcactgacaaaatcccaaaccgatcgtctggaggttctgctgaatccgaaagacgaaatcagcctgaattccggcaaaccgtttcgtgaactggagagcgaactgctgtcacgtcgtaaaaaagacctgcaacaaatctatgccgaagaacgtgagaactatctggggaaactggaacgtgaaatcacccgctttttcgtggatcgtggctttctggagatcaaatccccgattctgattcctctggagtatatcgagcgtatgggcatcgacaatgataccgaactgagcaaacaaattttccgtgtggataaaaacttctgtctgcgccctatgctagcaccaaatctggctaactatctgcgcaaactggaccgtgccctgcctgatcctatcaaaatcttcgagatcggcccgtgttatcgtaaagagtccgacggtaaagaacatctggaggagtttaccatgctgaacttttgccaaatgggttcaggttgtactcgtgagaacctggaaagcatcatcaccgattttctgaaccacctgggcattgacttcaaaattgtgggcgacagctgtatggtgtttggcgacaccctggatgtcatgcacggcgacctggaactgtctagtgccgttgtgggcccaatcccgctggatcgtgagtggggtatcgacaaaccttggatcggtgcgggttttggtctggagcgtctgctgaaagtaaaacacgacttcaagaacatcaaacgtgctgcacgttccgagtcctattacaatggtatttctactaacctgtaa

SEQ ID NO: 520 - protein, 2197 aa, Artificial Sequence
  Description of Artificial Sequence: Synthetic polypeptide
  LCK::EWSR1::MCP::PylRS(AF)::FUS::PylRS(AF)
MGCVCSSNPEGTELMASTDYSTYSQAAAQQGYSAYTAQPTQGYAQTTQAYGQQSYGTYGQPTDVSYTQAQTTATYGQTAYATSYGQPPTGYTTPTAPQAYSQPVQGYGTGAYDTTTATVTTTQASYAAQSAYGTQPAYPAYGQQPAATAPTRPQDGNKPTETSQPQSSTGGYNQPSLGYGQSNYSYPQVPGSYPMQPVTAPPSYPPTSYSSTQPTSYDQSSYSQQNTYGQPSSYGQQSSYGQQSSYGQQPPTSYPPQTGSYSQAPSQYSQQSSSYGQQSSFRQDHPSSMGVYGQESGGFSGPGENRSMSGPDNRGRGRGGFDRGGMSRGGRGGGRGGMGSAGERGGFNKPGGPMDEGPDLDLGPPVDPDEDSDNSAIYVQGLNDSVTLDDLADFFKQCGVVKMNKRTGQPMIHIYLDKETGKPKGDATVSYEDPPTAKAAVEWFDGKDFQGSKLKVSLARKKPPMNSMRGGLPPREGRGMPPPLRGGPGGPGGPGGPMGRMGGRGGDRGGFPPRGPRGSRGNPSGGGNVQHRAGDWQCPNPGCGNQNFAWRTECNQCKAPKPEGFLPPPFPPPGGDRGRGGPGGMRGGRGGLMDRGGPGGMFRGGRGGDRGGFRGGRGMDRGGFGGGRRGGPGGPPGPLMEQAIAYPYDVPDYAGAPGSAGSAAGSGASNFTQFVLVDNGGTGDVTVAPSNFANGIAEWISSNSRSQAYKVTCSVRQSSAQNRKYTIKVEVPKGAWRSYLNMELTIPIFATNSDCELIVKAMQGLLKDGNPIPSAIAANSGIYGLSYTDIEMNRLGKACPVPLQLPPLERLTLDDKKPLNTLISATGLWMSRTGTIHKIKHHEVSRSKIYIEMACGDHLVVNNSRSSRTARALRHHKYRKTCKRCRVSDEDLNKFLTKANEDQTSVKVKVVSAPTRTKKAMPKSVARAPKPLENTEAAQAQPSGSKFSPAIPVSTQESVSVPASVSTSISSISTGATASALVKGNTNPITSMSAPVQASAPALTKSQTDRLEVLLNPKDEISLNSGKPFRELESELLSRRKKDLQQIYAEERENYLGKLEREITRFFVDRGFLEIKSPILIPLEYIERMGIDNDTELSKQIFRVDKNFCLRPMLAPNLANYLRKLDRALPDPIKIFEIGPCYRKESDGKEHLEEFTMLNFCQMGSGCTRENLESIITDFLNHLGIDFKIVGDSCMVFGDTLDVMHGDLELSSAVVGPIPLDREWGIDKPWIGAGFGLERLLKVKHDFKNIKRAARSESYYNGISTNLASNDYTQQATQSYGAYPTQPGQGYSQQSSQPYGQQSYSGYSQSTDTSGYGQSSYSSYGQSQNTGYGTQSTPQGYGSTGGYGSSQSSQSSYGQQSSYPGYGQQPAPSSTSGSYGSSSQSSSYGQPQSGSYSQQPSYGGQQQSYGQQQSYNPPQGYGQQNQYNSSSGGGGGGGGGGNYGQDQSSMSSGGGSGGGYGNQDQSGGGGSGGYGQQDRGGRGRGGSGGGGGGGGGGYNRSSGGYEPRGRGGGRGGRGGMGGSDRGGFNKFGGPRDQGSRHDSEQDNSDNNTIFVQGLGENVTIESVADYFKQIGIIKTNKKTGQPMINLYTDRETGKLKGEATVSFDDPPSAKAAIDWFDGKEFSGNPIKVSFATRRADFNRGGGNGRGGRGRGGPMGRGGYGGGGSGGGGRGGFPSGGGGGGGQQRAGDWKCPNPTCENMNFSWRNECNQCKAPKPDGPGGGPGGSHMGGNYGDDRRGGRGGDKKPLNTLISATGLWMSRTGTIHKIKHHEVSRSKIYIEMACGDHLVVNNSRSSRTARALRHHKYRKTCKRCRVSDEDLNKFLTKANEDQTSVKVKVVSAPTRTKKAMPKSVARAPKPLENTEAAQAQPSGSKFSPAIPVSTQESVSVPASVSTSISSISTGATASALVKGNTNPITSMSAPVQASAPALTKSQTDRLEVLLNPKDEISLNSGKPFRELESELLSRRKKDLQQIYAEERENYLGKLEREITRFFVDRGFLEIKSPILIPLEYIERMGIDNDTELSKQIFRVDKNFCLRPMLAPNLANYLRKLDRALPDPIKIFEIGPCYRKESDGKEHLEEFTMLNFCQMGSGCTRENLESIITDFLNHLGIDFKIVGDSCMVFGDTLDVMHGDLELSSAVVGPIPLDREWGIDKPWIGAGFGLERLLKVKHDFKNIKRAARSESYYNGISTNL

SEQ ID NO: 521 - DNA, 6888 bp, Artificial Sequence
  Description of Artificial Sequence: Synthetic polynucleotide
  TOM20::EWSR1::4xlambdaN22::PylRS(AF)::FUS::PylRS(AF)
atggtgggtcggaacagcgccatcgccgccggtgtatgcggggcccttttcattgggtactgcatctacttcgaccgcaaaagacgaagtgaccccaacttcaagaacaggcttcgagaacgaagaaagaaacagaagcttgccaaggagagagctgggctttccaagttacctgaccttaaagatgctgaagctgttcagaagttcttcatggcgtccacggattacagtacctatagccaagctgcagcgcagcagggctacagtgcttacaccgcccagcccactcaaggatatgcacagaccacccaggcatatgggcaacaaagctatggaacctatggacagcccactgatgtcagctatacccaggctcagaccactgcaacctatgggcagaccgcctatgcaacttcttatggacagcctcccactggttatactactccaactgccccccaggcatacagccagcctgtccaggggtatggcactggtgcttatgataccaccactgctacagtcaccaccacccaggcctcctatgcagctcagtctgcatatggcactcagcctgcttatccagcctatgggcagcagccagcagccactgcacctacaagaccgcaggatggaaacaagcccactgagactagtcaacctcaatctagcacagggggttacaaccagcccagcctaggatatggacagagtaactacagttatccccaggtacctgggagctaccccatgcagccagtcactgcacctccatcctaccctcctaccagctattcctctacacagccgactagttatgatcagagcagttactctcagcagaacacctatgggcaaccgagcagctatggacagcagagtagctatggtcaacaaagcagctatgggcagcagcctcccactagttacccaccccaaactggatcctacagccaagctccaagtcaatatagccaacagagcagcagctacgggcagcagagttcattccgacaggaccaccccagtagcatgggtgtttatgggcaggagtctggaggattttccggaccaggagagaaccggagcatgagtggccctgataaccggggcaggggaagagggggatttgatcgtggaggcatgagcagaggtgggcggggaggaggacgcggtggaatgggcagcgctggagagcgaggtggcttcaataagcctggtggacccatggatgaaggaccagatcttgatctaggcccacctgtagatccagatgaagactctgacaacagtgcaatttatgtacaaggattaaatgacagtgtgactctagatgatctggcagacttctttaagcagtgtggggttgttaagatgaacaagagaactgggcaacccatgatccacatctacctggacaaggaaacaggaaagcccaaaggcgatgccacagtgtcctatgaagacccacctactgccaaggctgccgtggaatggtttgatgggaaagattttcaagggagcaaacttaaagtctcccttgctcggaagaagcctccaatgaacagtatgcggggtggtctgccaccccgtgagggcagaggcatgccaccaccactccgtggaggtccaggaggcccaggaggtcctgggggacccatgggtcgcatgggaggccgtggaggagatagaggaggcttccctccaagaggaccccggggttcccgagggaacccctctggaggaggaaacgtccagcaccgagctggagactggcagtgtcccaatccgggttgtggaaaccagaacttcgcctggagaacagagtgcaaccagtgtaaggccccaaagcctgaaggcttcctcccgccaccctttccgcccccgggtggtgatcgtggcagaggtggccctggtggcatgcggggaggaagaggtggcctcatggatcgtggtggtcccggtggaatgttcagaggtggccgtggtggagacagaggtggcttccgtggtggccggggcatggaccgaggtggctttggtggaggaagacgaggtggccctggggggccccctggacctttgatggaacaggcgatcgcaggagcaccaggaagtgctggttctgctgctggtagtggagagcagaagctgatctcagaggaggacctgctagccaccatggacgcacaaacacgacgacgtgagcgtcgcgctgagaaacaagctcaatggaaagctgcaaacccaccgctcgacggagccggagctggcgctggagctggagccggagctggcggtctagccaccatggacgcacaaacacgacgacgtgagcgtcgcgctgagaaacaagctcaatggaaagctgcaaacccaccgctcgacggagccggagctggcgctggagctggagccggagctggcggtctagccaccatggacgcacaaacacgacgacgtgagcgtcgcgctgagaaacaagctcaatggaaagctgcaaacccaccgctcgacggagccggagctggcgctggagctggagccggagctggcggtctagccaccatggacgcacaaacacgacgacgtgagcgtcgcgctgagaaacaagctcaatggaaagctgcaaacccaccgctcgggctaagctatacagatattgaaatgaacagattgggaaaggcgtgcccggtgccgctgcagctgccgccgctggaacgcctgaccctggatgataaaaaaccgctgaataccctgatctctgctactggtctgtggatgagtcgtaccggaaccattcataaaatcaaacaccacgaggttagccgttcgaaaatctatattgagatggcgtgtggcgatcatctggttgtgaacaatagccgctcttctcgtacagcacgtgcactgcgtcaccacaaatatcgtaaaacctgtaaacgttgccgtgtgtccgatgaggatctgaacaaattcctgacaaaagccaatgaggaccaaacaagcgtgaaagtgaaagtcgttagcgctcctacccgtactaaaaaagcaatgccgaaatccgttgctcgtgcccctaaaccactggaaaacactgaagcagcacaggcacagccgtctggaagcaaattctctccggccattcctgtttctacccaggagtccgtttctgttccagcaagtgtgagcaccagcattagcagtattagcaccggtgccaccgctagcgccctggttaaaggcaataccaatccgattacaagcatgtctgccccggttcaagcatcagctccagcactgacaaaatcccaaaccgatcgtctggaggttctgctgaatccgaaagacgaaatcagcctgaattccggcaaaccgtttcgtgaactggagagcgaactgctgtcacgtcgtaaaaaagacctgcaacaaatctatgccgaagaacgtgagaactatctggggaaactggaacgtgaaatcacccgctttttcgtggatcgtggctttctggagatcaaatccccgattctgattcctctggagtatatcgagcgtatgggcatcgacaatgataccgaactgagcaaacaaattttccgtgtggataaaaacttctgtctgcgccctatgctagcaccaaatctggctaactatctgcgcaaactggaccgtgccctgcctgatcctatcaaaatcttcgagatcggcccgtgttatcgtaaagagtccgacggtaaagaacatctggaggagtttaccatgctgaacttttgccaaatgggttcaggttgtactcgtgagaacctggaaagcatcatcaccgattttctgaaccacctgggcattgacttcaaaattgtgggcgacagctgtatggtgtttggcgacaccctggatgtcatgcacggcgacctggaactgtctagtgccgttgtgggcccaatcccgctggatcgtgagtggggtatcgacaaaccttggatcggtgcgggttttggtctggagcgtctgctgaaagtaaaacacgacttcaagaacatcaaacgtgctgcacgttccgagtcctattacaatggtatttctactaacctggcctcaaacgattatacccaacaagcaacccaaagctatggggcctaccccacccagcccgggcagggctattcccagcagagcagtcagccctacggacagcagagttacagtggttatagccagtccacggacacttcaggatatggccagagcagctattcttcttatggccagagccagaacacaggctatggaactcagtcaactccccagggatatggctcgactggcggctatggcagtagccagagctcccaatcgtcttacgggcagcagtcctcctaccctggctatggccagcagccagctcccagcagcacctcgggaagttacggtagcagttctcagagcagcagctatgggcagccccagagtgggagctacagccagcagcctagctatggtggacagcagcaaagctatggacagcagcaaagctataatccccctcagggctatggacagcagaaccagtacaacagcagcagtggtggtggaggtggaggtggaggtggaggtaactatggccaagatcaatcctccatgagtagtggtggtggcagtggtggcggttatggcaatcaagaccagagtggtggaggtggcagcggtggctatggacagcaggaccgtggaggccgcggcaggggtggcagtggtggcggcggcggcggcggcggtggtggttacaaccgcagcagtggtggctatgaacccagaggtcgtggaggtggccgtggaggcagaggtggcatgggcggaagtgaccgtggtggcttcaataaatttggtggccctcgggaccaaggatcacgtcatgactccgaacaggataattcagacaacaacaccatctttgtgcaaggcctgggtgagaatgttacaattgagtctgtggctgattacttcaagcagattggtattattaagacaaacaagaaaacgggacagcccatgattaatttgtacacagacagggaaactggcaagctgaagggagaggcaacggtctcttttgatgacccaccttcagctaaagcagctattgactggtttgatggtaaagaattctccggaaatcctatcaaggtctcatttgctactcgccgggcagactttaatcggggtggtggcaatggtcgtggaggccgagggcgaggaggacccatgggccgtggaggctatggaggtggtggcagtggtggtggtggccgaggaggatttcccagtggaggtggtggcggtggaggacagcagcgagctggtgactggaagtgtcctaatcccacctgtgagaatatgaacttctcttggaggaatgaatgcaaccagtgtaaggcccctaaaccagatggcccaggagggggaccaggtggctctcacatggggggtaactacggggatgatcgtcgtggtggcagaggaggcgataaaaaaccgctgaataccctgatctctgctactggtctgtggatgagtcgtaccggaaccattcataaaatcaaacaccacgaggttagccgttcgaaaatctatattgagatggcgtgtggcgatcatctggttgtgaacaatagccgctcttctcgtacagcacgtgcactgcgtcaccacaaatatcgtaaaacctgtaaacgttgccgtgtgtccgatgaggatctgaacaaattcctgacaaaagccaatgaggaccaaacaagcgtgaaagtgaaagtcgttagcgctcctacccgtactaaaaaagcaatgccgaaatccgttgctcgtgcccctaaaccactggaaaacactgaagcagcacaggcacagccgtctggaagcaaattctctccggccattcctgtttctacccaggagtccgtttctgttccagcaagtgtgagcaccagcattagcagtattagcaccggtgccaccgctagcgccctggttaaaggcaataccaatccgattacaagcatgtctgccccggttcaagcatcagctccagcactgacaaaatcccaaaccgatcgtctggaggttctgctgaatccgaaagacgaaatcagcctgaattccggcaaaccgtttcgtgaactggagagcgaactgctgtcacgtcgtaaaaaagacctgcaacaaatctatgccgaagaacgtgagaactatctggggaaactggaacgtgaaatcacccgctttttcgtggatcgtggctttctggagatcaaatccccgattctgattcctctggagtatatcgagcgtatgggcatcgacaatgataccgaactgagcaaacaaattttccgtgtggataaaaacttctgtctgcgccctatgctagcaccaaatctggctaactatctgcgcaaactggaccgtgccctgcctgatcctatcaaaatcttcgagatcggcccgtgttatcgtaaagagtccgacggtaaagaacatctggaggagtttaccatgctgaacttttgccaaatgggttcaggttgtactcgtgagaacctggaaagcatcatcaccgattttctgaaccacctgggcattgacttcaaaattgtgggcgacagctgtatggtgtttggcgacaccctggatgtcatgcacggcgacctggaactgtctagtgccgttgtgggcccaatcccgctggatcgtgagtggggtatcgacaaaccttggatcggtgcgggttttggtctggagcgtctgctgaaagtaaaacacgacttcaagaacatcaaacgtgctgcacgttccgagtcctattacaatggtatttctactaacctgtaa

SEQ ID NO: 522 - protein, 2295 aa, Artificial Sequence
  Description of Artificial Sequence: Synthetic polypeptide
  TOM20::EWSR1::4xlambdaN22::PylRS(AF)::FUS::PylRS(AF)
MVGRNSAIAAGVCGALFIGYCIYFDRKRRSDPNFKNRLRERRKKQKLAKERAGLSKLPDLKDAEAVQKFFMASTDYSTYSQAAAQQGYSAYTAQPTQGYAQTTQAYGQQSYGTYGQPTDVSYTQAQTTATYGQTAYATSYGQPPTGYTTPTAPQAYSQPVQGYGTGAYDTTTATVTTTQASYAAQSAYGTQPAYPAYGQQPAATAPTRPQDGNKPTETSQPQSSTGGYNQPSLGYGQSNYSYPQVPGSYPMQPVTAPPSYPPTSYSSTQPTSYDQSSYSQQNTYGQPSSYGQQSSYGQQSSYGQQPPTSYPPQTGSYSQAPSQYSQQSSSYGQQSSFRQDHPSSMGVYGQESGGFSGPGENRSMSGPDNRGRGRGGFDRGGMSRGGRGGGRGGMGSAGERGGFNKPGGPMDEGPDLDLGPPVDPDEDSDNSAIYVQGLNDSVTLDDLADFFKQCGVVKMNKRTGQPMIHIYLDKETGKPKGDATVSYEDPPTAKAAVEWFDGKDFQGSKLKVSLARKKPPMNSMRGGLPPREGRGMPPPLRGGPGGPGGPGGPMGRMGGRGGDRGGFPPRGPRGSRGNPSGGGNVQHRAGDWQCPNPGCGNQNFAWRTECNQCKAPKPEGFLPPPFPPPGGDRGRGGPGGMRGGRGGLMDRGGPGGMFRGGRGGDRGGFRGGRGMDRGGFGGGRRGGPGGPPGPLMEQAIAGAPGSAGSAAGSGEQKLISEEDLLATMDAQTRRRERRAEKQAQWKAANPPLDGAGAGAGAGAGAGGLATMDAQTRRRERRAEKQAQWKAANPPLDGAGAGAGAGAGAGGLATMDAQTRRRERRAEKQAQWKAANPPLDGAGAGAGAGAGAGGLATMDAQTRRRERRAEKQAQWKAANPPLGLSYTDIEMNRLGKACPVPLQLPPLERLTLDDKKPLNTLISATGLWMSRTGTIHKIKHHEVSRSKIYIEMACGDHLVVNNSRSSRTARALRHHKYRKTCKRCRVSDEDLNKFLTKANEDQTSVKVKVVSAPTRTKKAMPKSVARAPKPLENTEAAQAQPSGSKFSPAIPVSTQESVSVPASVSTSISSISTGATASALVKGNTNPITSMSAPVQASAPALTKSQTDRLEVLLNPKDEISLNSGKPFRELESELLSRRKKDLQQIYAEERENYLGKLEREITRFFVDRGFLEIKSPILIPLEYIERMGIDNDTELSKQIFRVDKNFCLRPMLAPNLANYLRKLDRALPDPIKIFEIGPCYRKESDGKEHLEEFTMLNFCQMGSGCTRENLESIITDFLNHLGIDFKIVGDSCMVFGDTLDVMHGDLELSSAVVGPIPLDREWGIDKPWIGAGFGLERLLKVKHDFKNIKRAARSESYYNGISTNLASNDYTQQATQSYGAYPTQPGQGYSQQSSQPYGQQSYSGYSQSTDTSGYGQSSYSSYGQSQNTGYGTQSTPQGYGSTGGYGSSQSSQSSYGQQSSYPGYGQQPAPSSTSGSYGSSSQSSSYGQPQSGSYSQQPSYGGQQQSYGQQQSYNPPQGYGQQNQYNSSSGGGGGGGGGGNYGQDQSSMSSGGGSGGGYGNQDQSGGGGSGGYGQQDRGGRGRGGSGGGGGGGGGGYNRSSGGYEPRGRGGGRGGRGGMGGSDRGGFNKFGGPRDQGSRHDSEQDNSDNNTIFVQGLGENVTIESVADYFKQIGIIKTNKKTGQPMINLYTDRETGKLKGEATVSFDDPPSAKAAIDWFDGKEFSGNPIKVSFATRRADFNRGGGNGRGGRGRGGPMGRGGYGGGGSGGGGRGGFPSGGGGGGGQQRAGDWKCPNPTCENMNFSWRNECNQCKAPKPDGPGGGPGGSHMGGNYGDDRRGGRGGDKKPLNTLISATGLWMSRTGTIHKIKHHEVSRSKIYIEMACGDHLVVNNSRSSRTARALRHHKYRKTCKRCRVSDEDLNKFLTKANEDQTSVKVKVVSAPTRTKKAMPKSVARAPKPLENTEAAQAQPSGSKFSPAIPVSTQESVSVPASVSTSISSISTGATASALVKGNTNPITSMSAPVQASAPALTKSQTDRLEVLLNPKDEISLNSGKPFRELESELLSRRKKDLQQIYAEERENYLGKLEREITRFFVDRGFLEIKSPILIPLEYIERMGIDNDTELSKQIFRVDKNFCLRPMLAPNLANYLRKLDRALPDPIKIFEIGPCYRKESDGKEHLEEFTMLNFCQMGSGCTRENLESIITDFLNHLGIDFKIVGDSCMVFGDTLDVMHGDLELSSAVVGPIPLDREWGIDKPWIGAGFGLERLLKVKHDFKNIKRAARSESYYNGISTNL

SEQ ID NO: 523 - DNA, 6762 bp, Artificial Sequence
  Description of Artificial Sequence: Synthetic polynucleotide
  TOM20::EWSR1::MCP::PylRS(AF)::FUS::PylRS(AF)
atggtgggtcggaacagcgccatcgccgccggtgtatgcggggcccttttcattgggtactgcatctacttcgaccgcaaaagacgaagtgaccccaacttcaagaacaggcttcgagaacgaagaaagaaacagaagcttgccaaggagagagctgggctttccaagttacctgaccttaaagatgctgaagctgttcagaagttcttcatggcgtccacggattacagtacctatagccaagctgcagcgcagcagggctacagtgcttacaccgcccagcccactcaaggatatgcacagaccacccaggcatatgggcaacaaagctatggaacctatggacagcccactgatgtcagctatacccaggctcagaccactgcaacctatgggcagaccgcctatgcaacttcttatggacagcctcccactggttatactactccaactgccccccaggcatacagccagcctgtccaggggtatggcactggtgcttatgataccaccactgctacagtcaccaccacccaggcctcctatgcagctcagtctgcatatggcactcagcctgcttatccagcctatgggcagcagccagcagccactgcacctacaagaccgcaggatggaaacaagcccactgagactagtcaacctcaatctagcacagggggttacaaccagcccagcctaggatatggacagagtaactacagttatccccaggtacctgggagctaccccatgcagccagtcactgcacctccatcctaccctcctaccagctattcctctacacagccgactagttatgatcagagcagttactctcagcagaacacctatgggcaaccgagcagctatggacagcagagtagctatggtcaacaaagcagctatgggcagcagcctcccactagttacccaccccaaactggatcctacagccaagctccaagtcaatatagccaacagagcagcagctacgggcagcagagttcattccgacaggaccaccccagtagcatgggtgtttatgggcaggagtctggaggattttccggaccaggagagaaccggagcatgagtggccctgataaccggggcaggggaagagggggatttgatcgtggaggcatgagcagaggtgggcggggaggaggacgcggtggaatgggcagcgctggagagcgaggtggcttcaataagcctggtggacccatggatgaaggaccagatcttgatctaggcccacctgtagatccagatgaagactctgacaacagtgcaatttatgtacaaggattaaatgacagtgtgactctagatgatctggcagacttctttaagcagtgtggggttgttaagatgaacaagagaactgggcaacccatgatccacatctacctggacaaggaaacaggaaagcccaaaggcgatgccacagtgtcctatgaagacccacctactgccaaggctgccgtggaatggtttgatgggaaagattttcaagggagcaaacttaaagtctcccttgctcggaagaagcctccaatgaacagtatgcggggtggtctgccaccccgtgagggcagaggcatgccaccaccactccgtggaggtccaggaggcccaggaggtcctgggggacccatgggtcgcatgggaggccgtggaggagatagaggaggcttccctccaagaggaccccggggttcccgagggaacccctctggaggaggaaacgtccagcaccgagctggagactggcagtgtcccaatccgggttgtggaaaccagaacttcgcctggagaacagagtgcaaccagtgtaaggccccaaagcctgaaggcttcctcccgccaccctttccgcccccgggtggtgatcgtggcagaggtggccctggtggcatgcggggaggaagaggtggcctcatggatcgtggtggtcccggtggaatgttcagaggtggccgtggtggagacagaggtggcttccgtggtggccggggcatggaccgaggtggctttggtggaggaagacgaggtggccctggggggccccctggacctttgatggaacaggcgatcgcatatccctatgatgtgccggattatgctggagcaccaggaagtgctggttctgctgctggtagtggagcttctaactttactcagttcgttctcgtcgacaatggcggaactggcgacgtgactgtcgccccaagcaacttcgctaacgggatcgctgaatggatcagctctaactcgcgttcacaggcttacaaagtaacctgtagcgttcgtcagagctctgcgcagaatcgcaaatacaccatcaaagtcgaggtgcctaaaggcgcctggcgttcgtacttaaatatggaactaaccattccaattttcgccacgaattccgactgcgagcttattgttaaggcaatgcaaggtctcctaaaagatggaaacccgattccctcagcaatcgcagcaaactccggcatctacgggctaagctatacagatattgaaatgaacagattgggaaaggcgtgcccggtgccgctgcagctgccgccgctggaacgcctgaccctggatgataaaaaaccgctgaataccctgatctctgctactggtctgtggatgagtcgtaccggaaccattcataaaatcaaacaccacgaggttagccgttcgaaaatctatattgagatggcgtgtggcgatcatctggttgtgaacaatagccgctcttctcgtacagcacgtgcactgcgtcaccacaaatatcgtaaaacctgtaaacgttgccgtgtgtccgatgaggatctgaacaaattcctgacaaaagccaatgaggaccaaacaagcgtgaaagtgaaagtcgttagcgctcctacccgtactaaaaaagcaatgccgaaatccgttgctcgtgcccctaaaccactggaaaacactgaagcagcacaggcacagccgtctggaagcaaattctctccggccattcctgtttctacccaggagtccgtttctgttccagcaagtgtgagcaccagcattagcagtattagcaccggtgccaccgctagcgccctggttaaaggcaataccaatccgattacaagcatgtctgccccggttcaagcatcagctccagcactgacaaaatcccaaaccgatcgtctggaggttctgctgaatccgaaagacgaaatcagcctgaattccggcaaaccgtttcgtgaactggagagcgaactgctgtcacgtcgtaaaaaagacctgcaacaaatctatgccgaagaacgtgagaactatctggggaaactggaacgtgaaatcacccgctttttcgtggatcgtggctttctggagatcaaatccccgattctgattcctctggagtatatcgagcgtatgggcatcgacaatgataccgaactgagcaaacaaattttccgtgtggataaaaacttctgtctgcgccctatgctagcaccaaatctggctaactatctgcgcaaactggaccgtgccctgcctgatcctatcaaaatcttcgagatcggcccgtgttatcgtaaagagtccgacggtaaagaacatctggaggagtttaccatgctgaacttttgccaaatgggttcaggttgtactcgtgagaacctggaaagcatcatcaccgattttctgaaccacctgggcattgacttcaaaattgtgggcgacagctgtatggtgtttggcgacaccctggatgtcatgcacggcgacctggaactgtctagtgccgttgtgggcccaatcccgctggatcgtgagtggggtatcgacaaaccttggatcggtgcgggttttggtctggagcgtctgctgaaagtaaaacacgacttcaagaacatcaaacgtgctgcacgttccgagtcctattacaatggtatttctactaacctggcctcaaacgattatacccaacaagcaacccaaagctatggggcctaccccacccagcccgggcagggctattcccagcagagcagtcagccctacggacagcagagttacagtggttatagccagtccacggacacttcaggatatggccagagcagctattcttcttatggccagagccagaacacaggctatggaactcagtcaactccccagggatatggctcgactggcggctatggcagtagccagagctcccaatcgtcttacgggcagcagtcctcctaccctggctatggccagcagccagctcccagcagcacctcgggaagttacggtagcagttctcagagcagcagctatgggcagccccagagtgggagctacagccagcagcctagctatggtggacagcagcaaagctatggacagcagcaaagctataatccccctcagggctatggacagcagaaccagtacaacagcagcagtggtggtggaggtggaggtggaggtggaggtaactatggccaagatcaatcctccatgagtagtggtggtggcagtggtggcggttatggcaatcaagaccagagtggtggaggtggcagcggtggctatggacagcaggaccgtggaggccgcggcaggggtggcagtggtggcggcggcggcggcggcggtggtggttacaaccgcagcagtggtggctatgaacccagaggtcgtggaggtggccgtggaggcagaggtggcatgggcggaagtgaccgtggtggcttcaataaatttggtggccctcgggaccaaggatcacgtcatgactccgaacaggataattcagacaacaacaccatctttgtgcaaggcctgggtgagaatgttacaattgagtctgtggctgattacttcaagcagattggtattattaagacaaacaagaaaacgggacagcccatgattaatttgtacacagacagggaaactggcaagctgaagggagaggcaacggtctcttttgatgacccaccttcagctaaagcagctattgactggtttgatggtaaagaattctccggaaatcctatcaaggtctcatttgctactcgccgggcagactttaatcggggtggtggcaatggtcgtggaggccgagggcgaggaggacccatgggccgtggaggctatggaggtggtggcagtggtggtggtggccgaggaggatttcccagtggaggtggtggcggtggaggacagcagcgagctggtgactggaagtgtcctaatcccacctgtgagaatatgaacttctcttggaggaatgaatgcaaccagtgtaaggcccctaaaccagatggcccaggagggggaccaggtggctctcacatggggggtaactacggggatgatcgtcgtggtggcagaggaggcgataaaaaaccgctgaataccctgatctctgctactggtctgtggatgagtcgtaccggaaccattcataaaatcaaacaccacgaggttagccgttcgaaaatctatattgagatggcgtgtggcgatcatctggttgtgaacaatagccgctcttctcgtacagcacgtgcactgcgtcaccacaaatatcgtaaaacctgtaaacgttgccgtgtgtccgatgaggatctgaacaaattcctgacaaaagccaatgaggaccaaacaagcgtgaaagtgaaagtcgttagcgctcctacccgtactaaaaaagcaatgccgaaatccgttgctcgtgcccctaaaccactggaaaacactgaagcagcacaggcacagccgtctggaagcaaattctctccggccattcctgtttctacccaggagtccgtttctgttccagcaagtgtgagcaccagcattagcagtattagcaccggtgccaccgctagcgccctggttaaaggcaataccaatccgattacaagcatgtctgccccggttcaagcatcagctccagcactgacaaaatcccaaaccgatcgtctggaggttctgctgaatccgaaagacgaaatcagcctgaattccggcaaaccgtttcgtgaactggagagcgaactgctgtcacgtcgtaaaaaagacctgcaacaaatctatgccgaagaacgtgagaactatctggggaaactggaacgtgaaatcacccgctttttcgtggatcgtggctttctggagatcaaatccccgattctgattcctctggagtatatcgagcgtatgggcatcgacaatgataccgaactgagcaaacaaattttccgtgtggataaaaacttctgtctgcgccctatgctagcaccaaatctggctaactatctgcgcaaactggaccgtgccctgcctgatcctatcaaaatcttcgagatcggcccgtgttatcgtaaagagtccgacggtaaagaacatctggaggagtttaccatgctgaacttttgccaaatgggttcaggttgtactcgtgagaacctggaaagcatcatcaccgattttctgaaccacctgggcattgacttcaaaattgtgggcgacagctgtatggtgtttggcgacaccctggatgtcatgcacggcgacctggaactgtctagtgccgttgtgggcccaatcccgctggatcgtgagtggggtatcgacaaaccttggatcggtgcgggttttggtctggagcgtctgctgaaagtaaaacacgacttcaagaacatcaaacgtgctgcacgttccgagtcctattacaatggtatttctactaacctgtaa

SEQ ID NO: 524 - protein, 2253 aa, Artificial Sequence
  Description of Artificial Sequence: Synthetic polypeptide
  TOM20::EWSR1::MCP::PylRS(AF)::FUS::PylRS(AF)
MVGRNSAIAAGVCGALFIGYCIYFDRKRRSDPNFKNRLRERRKKQKLAKERAGLSKLPDLKDAEAVQKFFMASTDYSTYSQAAAQQGYSAYTAQPTQGYAQTTQAYGQQSYGTYGQPTDVSYTQAQTTATYGQTAYATSYGQPPTGYTTPTAPQAYSQPVQGYGTGAYDTTTATVTTTQASYAAQSAYGTQPAYPAYGQQPAATAPTRPQDGNKPTETSQPQSSTGGYNQPSLGYGQSNYSYPQVPGSYPMQPVTAPPSYPPTSYSSTQPTSYDQSSYSQQNTYGQPSSYGQQSSYGQQSSYGQQPPTSYPPQTGSYSQAPSQYSQQSSSYGQQSSFRQDHPSSMGVYGQESGGFSGPGENRSMSGPDNRGRGRGGFDRGGMSRGGRGGGRGGMGSAGERGGFNKPGGPMDEGPDLDLGPPVDPDEDSDNSAIYVQGLNDSVTLDDLADFFKQCGVVKMNKRTGQPMIHIYLDKETGKPKGDATVSYEDPPTAKAAVEWFDGKDFQGSKLKVSLARKKPPMNSMRGGLPPREGRGMPPPLRGGPGGPGGPGGPMGRMGGRGGDRGGFPPRGPRGSRGNPSGGGNVQHRAGDWQCPNPGCGNQNFAWRTECNQCKAPKPEGFLPPPFPPPGGDRGRGGPGGMRGGRGGLMDRGGPGGMFRGGRGGDRGGFRGGRGMDRGGFGGGRRGGPGGPPGPLMEQAIAYPYDVPDYAGAPGSAGSAAGSGASNFTQFVLVDNGGTGDVTVAPSNFANGIAEWISSNSRSQAYKVTCSVRQSSAQNRKYTIKVEVPKGAWRSYLNMELTIPIFATNSDCELIVKAMQGLLKDGNPIPSAIAANSGIYGLSYTDIEMNRLGKACPVPLQLPPLERLTLDDKKPLNTLISATGLWMSRTGTIHKIKHHEVSRSKIYIEMACGDHLVVNNSRSSRTARALRHHKYRKTCKRCRVSDEDLNKFLTKANEDQTSVKVKVVSAPTRTKKAMPKSVARAPKPLENTEAAQAQPSGSKFSPAIPVSTQESVSVPASVSTSISSISTGATASALVKGNTNPITSMSAPVQASAPALTKSQTDRLEVLLNPKDEISLNSGKPFRELESELLSRRKKDLQQIYAEERENYLGKLEREITRFFVDRGFLEIKSPILIPLEYIERMGIDNDTELSKQIFRVDKNFCLRPMLAPNLANYLRKLDRALPDPIKIFEIGPCYRKESDGKEHLEEFTMLNFCQMGSGCTRENLESIITDFLNHLGIDFKIVGDSCMVFGDTLDVMHGDLELSSAVVGPIPLDREWGIDKPWIGAGFGLERLLKVKHDFKNIKRAARSESYYNGISTNLASNDYTQQATQSYGAYPTQPGQGYSQQSSQPYGQQSYSGYSQSTDTSGYGQSSYSSYGQSQNTGYGTQSTPQGYGSTGGYGSSQSSQSSYGQQSSYPGYGQQPAPSSTSGSYGSSSQSSSYGQPQSGSYSQQPSYGGQQQSYGQQQSYNPPQGYGQQNQYNSSSGGGGGGGGGGNYGQDQSSMSSGGGSGGGYGNQDQSGGGGSGGYGQQDRGGRGRGGSGGGGGGGGGGYNRSSGGYEPRGRGGGRGGRGGMGGSDRGGFNKFGGPRDQGSRHDSEQDNSDNNTIFVQGLGENVTIESVADYFKQIGIIKTNKKTGQPMINLYTDRETGKLKGEATVSFDDPPSAKAAIDWFDGKEFSGNPIKVSFATRRADFNRGGGNGRGGRGRGGPMGRGGYGGGGSGGGGRGGFPSGGGGGGGQQRAGDWKCPNPTCENMNFSWRNECNQCKAPKPDGPGGGPGGSHMGGNYGDDRRGGRGGDKKPLNTLISATGLWMSRTGTIHKIKHHEVSRSKIYIEMACGDHLVVNNSRSSRTARALRHHKYRKTCKRCRVSDEDLNKFLTKANEDQTSVKVKVVSAPTRTKKAMPKSVARAPKPLENTEAAQAQPSGSKFSPAIPVSTQESVSVPASVSTSISSISTGATASALVKGNTNPITSMSAPVQASAPALTKSQTDRLEVLLNPKDEISLNSGKPFRELESELLSRRKKDLQQIYAEERENYLGKLEREITRFFVDRGFLEIKSPILIPLEYIERMGIDNDTELSKQIFRVDKNFCLRPMLAPNLANYLRKLDRALPDPIKIFEIGPCYRKESDGKEHLEEFTMLNFCQMGSGCTRENLESIITDFLNHLGIDFKIVGDSCMVFGDTLDVMHGDLELSSAVVGPIPLDREWGIDKPWIGAGFGLERLLKVKHDFKNIKRAARSESYYNGISTNL

SEQ ID NO: 525 - DNA, 4245 bp, Artificial Sequence; identical to SEQ ID NO: 493
  Description of Artificial Sequence: Synthetic polynucleotide
  LCK::PylRS(AA)::FUS::PylRS(AA)

SEQ ID NO: 526 - protein, 1414 aa, Artificial Sequence; identical to SEQ ID NO: 494
  Description of Artificial Sequence: Synthetic polypeptide
  LCK::PylRS(AA)::FUS::PylRS(AA)

SEQ ID NO: 527 - DNA, 2703 bp, Artificial Sequence
  Description of Artificial Sequence: Synthetic polynucleotide
  EBAG91-29::EWSR1::SYNZIP4::4xlambdaN22
atggccatcacccagtttcggttatttaaattttgtacctgcctagcaacagtattctcattcctaaagagattaatatgcagatctatggcgtccacggattacagtacctatagccaagctgcagcgcagcagggctacagtgcttacaccgcccagcccactcaaggatatgcacagaccacccaggcatatgggcaacaaagctatggaacctatggacagcccactgatgtcagctatacccaggctcagaccactgcaacctatgggcagaccgcctatgcaacttcttatggacagcctcccactggttatactactccaactgccccccaggcatacagccagcctgtccaggggtatggcactggtgcttatgataccaccactgctacagtcaccaccacccaggcctcctatgcagctcagtctgcatatggcactcagcctgcttatccagcctatgggcagcagccagcagccactgcacctacaagaccgcaggatggaaacaagcccactgagactagtcaacctcaatctagcacagggggttacaaccagcccagcctaggatatggacagagtaactacagttatccccaggtacctgggagctaccccatgcagccagtcactgcacctccatcctaccctcctaccagctattcctctacacagccgactagttatgatcagagcagttactctcagcagaacacctatgggcaaccgagcagctatggacagcagagtagctatggtcaacaaagcagctatgggcagcagcctcccactagttacccaccccaaactggatcctacagccaagctccaagtcaatatagccaacagagcagcagctacgggcagcagagttcattccgacaggaccaccccagtagcatgggtgtttatgggcaggagtctggaggattttccggaccaggagagaaccggagcatgagtggccctgataaccggggcaggggaagagggggatttgatcgtggaggcatgagcagaggtgggcggggaggaggacgcggtggaatgggcagcgctggagagcgaggtggcttcaataagcctggtggacccatggatgaaggaccagatcttgatctaggcccacctgtagatccagatgaagactctgacaacagtgcaatttatgtacaaggattaaatgacagtgtgactctagatgatctggcagacttctttaagcagtgtggggttgttaagatgaacaagagaactgggcaacccatgatccacatctacctggacaaggaaacaggaaagcccaaaggcgatgccacagtgtcctatgaagacccacctactgccaaggctgccgtggaatggtttgatgggaaagattttcaagggagcaaacttaaagtctcccttgctcggaagaagcctccaatgaacagtatgcggggtggtctgccaccccgtgagggcagaggcatgccaccaccactccgtggaggtccaggaggcccaggaggtcctgggggacccatgggtcgcatgggaggccgtggaggagatagaggaggcttccctccaagaggaccccggggttcccgagggaacccctctggaggaggaaacgtccagcaccgagctggagactggcagtgtcccaatccgggttgtggaaaccagaacttcgcctggagaacagagtgcaaccagtgtaaggccccaaagcctgaaggcttcctcccgccaccctttccgcccccgggtggtgatcgtggcagaggtggccctggtggcatgcggggaggaagaggtggcctcatggatcgtggtggtcccggtggaatgttcagaggtggccgtggtggagacagaggtggcttccgtggtggccggggcatggaccgaggtggctttggtggaggaagacgaggtggccctggggggccccctggacctttgatggaacaggcgatcgcacaaaaggtggctgaactgaaaaatagagtggccgtgaagctgaaccggaacgagcagctgaagaacaaggtggaagagctgaagaacagaaacgcctacctgaagaatgagctggccaccctggaaaacgaggtggccagactggaaaacgacgtggccgagggagcaccaggaagtgctggttctgctgctggtagtggagagcagaagctgatctcagaggaggacctgctagccaccatggacgcacaaacacgacgacgtgagcgtcgcgctgagaaacaagctcaatggaaagctgcaaacccaccgctcgacggagccggagctggcgctggagctggagccggagctggcggtctagccaccatggacgcacaaacacgacgacgtgagcgtcgcgctgagaaacaagctcaatggaaagctgcaaacccaccgctcgacggagccggagctggcgctggagctggagccggagctggcggtctagccaccatggacgcacaaacacgacgacgtgagcgtcgcgctgagaaacaagctcaatggaaagctgcaaacccaccgctcgacggagccggagctggcgctggagctggagccggagctggcggtctagccaccatggacgcacaaacacgacgacgtgagcgtcgcgctgagaaacaagctcaatggaaagctgcaaacccaccgctcgagtctagagggcccgtttaa

SEQ ID NO: 528 - protein, 900 aa, Artificial Sequence
  Description of Artificial Sequence: Synthetic polypeptide
  EBAG91-29::EWSR1::SYNZIP4::4xlambdaN22
MAITQFRLFKFCTCLATVFSFLKRLICRSMASTDYSTYSQAAAQQGYSAYTAQPTQGYAQTTQAYGQQSYGTYGQPTDVSYTQAQTTATYGQTAYATSYGQPPTGYTTPTAPQAYSQPVQGYGTGAYDTTTATVTTTQASYAAQSAYGTQPAYPAYGQQPAATAPTRPQDGNKPTETSQPQSSTGGYNQPSLGYGQSNYSYPQVPGSYPMQPVTAPPSYPPTSYSSTQPTSYDQSSYSQQNTYGQPSSYGQQSSYGQQSSYGQQPPTSYPPQTGSYSQAPSQYSQQSSSYGQQSSFRQDHPSSMGVYGQESGGFSGPGENRSMSGPDNRGRGRGGFDRGGMSRGGRGGGRGGMGSAGERGGFNKPGGPMDEGPDLDLGPPVDPDEDSDNSAIYVQGLNDSVTLDDLADFFKQCGVVKMNKRTGQPMIHIYLDKETGKPKGDATVSYEDPPTAKAAVEWFDGKDFQGSKLKVSLARKKPPMNSMRGGLPPREGRGMPPPLRGGPGGPGGPGGPMGRMGGRGGDRGGFPPRGPRGSRGNPSGGGNVQHRAGDWQCPNPGCGNQNFAWRTECNQCKAPKPEGFLPPPFPPPGGDRGRGGPGGMRGGRGGLMDRGGPGGMFRGGRGGDRGGFRGGRGMDRGGFGGGRRGGPGGPPGPLMEQAIAQKVAELKNRVAVKLNRNEQLKNKVEELKNRNAYLKNELATLENEVARLENDVAEGAPGSAGSAAGSGEQKLISEEDLLATMDAQTRRRERRAEKQAQWKAANPPLDGAGAGAGAGAGAGGLATMDAQTRRRERRAEKQAQWKAANPPLDGAGAGAGAGAGAGGLATMDAQTRRRERRAEKQAQWKAANPPLDGAGAGAGAGAGAGGLATMDAQTRRRERRAEKQAQWKAANPPLESRGPV

SEQ ID NO: 529 - DNA, 4308 bp, Artificial Sequence
  Description of Artificial Sequence: Synthetic polynucleotide
  KIF16B::FUS::SYNZIP1::PylRS(AF)
atggcatcggtcaaggtggccgtgagggtccggcccatgaatcgcagggaaaaggacttggaggccaagttcattattcagatggagaaaagcaaaacgacaatcacaaacttaaagataccagaaggaggcactggggactcaggaagagaacggaccaagaccttcacctatgacttttctttttattctgctgatacaaaaagcccagattacgtttcacaagaaatggttttcaaaaccctcggcacagatgtcgtgaagtctgcatttgaaggttataatgcttgtgtctttgcatatgggcaaactggatctggaaagtcatacactatgatgggaaattctggagattctggcttaatacctcggatctgtgaaggactcttcagtcggataaatgaaaccaccagatgggatgaagcttcttttcgaactgaagtcagctacttagaaatttataacgaacgtgtgagagatctacttcggcggaagtcatctaaaaccttcaatttgagagtccgtgagcatcccaaagaaggcccttatgttgaggatttatccaaacatttagtacagaattatggtgacgtagaagaacttatggatgcgggcaatatcaaccggaccaccgcagcgactgggatgaacgacgtcagtagcaggtctcatgccatcttcaccatcaagttcactcaggctaaatttgattctgaaatgccatgtgaaaccgtcagtaagatccacttggttgatcttgccggaagtgagcgtgcagatgccaccggagccaccggggttaggctaaaggaagggggaaatattaacaagtccctcgtgactctggggaacgtcatttctgccttagctgatttatctcaggatgctgcaaatactcttgcaaagaagaagcaagttttcgtgccttacagggattctgtgttgacttggttgttaaaagatagccttggaggaaactctaaaactatcatgattgccaccatttcacctgctgatgtcaattatggagaaaccctaagtactcttcgctatgcaaatagagccaaaaacatcatcaacaagcctaccattaatgaggatgccaacgtcaaacttatccgtgagctgcgagctgaaatagccagactgaaaacgctgcttgctcaagggaatcagattgccctcttagactcccccacatatacagatattgaaatgaacagattgggaaagggcgcccccggctccgccggctccgccgccggctccggcatggcctcaaacgattatacccaacaagcaacccaaagctatggggcctaccccacccagcccgggcagggctattcccagcagagcagtcagccctacggacagcagagttacagtggttatagccagtccacggacacttcaggatatggccagagcagctattcttcttatggccagagccagaacacaggctatggaactcagtcaactccccagggatatggctcgactggcggctatggcagtagccagagctcccaatcgtcttacgggcagcagtcctcctaccctggctatggccagcagccagctcccagcagcacctcgggaagttacggtagcagttctcagagcagcagctatgggcagccccagagtgggagctacagccagcagcctagctatggtggacagcagcaaagctatggacagcagcaaagctataatccccctcagggctatggacagcagaaccagtacaacagcagcagtggtggtggaggtggaggtggaggtggaggtaactatggccaagatcaatcctccatgagtagtggtggtggcagtggtggcggttatggcaatcaagaccagagtggtggaggtggcagcggtggctatggacagcaggaccgtggaggccgcggcaggggtggcagtggtggcggcggcggcggcggcggtggtggttacaaccgcagcagtggtggctatgaacccagaggtcgtggaggtggccgtggaggcagaggtggcatgggcggaagtgaccgtggtggcttcaataaatttggtggccctcgggaccaaggatcacgtcatgactccgaacaggataattcagacaacaacaccatctttgtgcaaggcctgggtgagaatgttacaattgagtctgtggctgattacttcaagcagattggtattattaagacaaacaagaaaacgggacagcccatgattaatttgtacacagacagggaaactggcaagctgaagggagaggcaacggtctcttttgatgacccaccttcagctaaagcagctattgactggtttgatggtaaagaattctccggaaatcctatcaaggtctcatttgctactcgccgggcagactttaatcggggtggtggcaatggtcgtggaggccgagggcgaggaggacccatgggccgtggaggctatggaggtggtggcagtggtggtggtggccgaggaggatttcccagtggaggtggtggcggtggaggacagcagcgagctggtgactggaagtgtcctaatcccacctgtgagaatatgaacttctcttggaggaatgaatgcaaccagtgtaaggcccctaaaccagatggcccaggagggggaccaggtggctctcacatggggggtaactacggggatgatcgtcgtggtggcagaggtggtgcgatcgcaaatctggtggcccagctggaaaacgaggtggccagcctggaaaacgagaacgaaaccctgaagaaaaagaacctgcacaagaaggacctgatcgcctacctggaaaaggaaatcgccaacctgagaaagaagatcgaggaaggagcaccaggaagtgctggttctgctgctggtagtggagcgtgcccggtgccgctgcagctgccgccgctggaacgcctgaccctggatgataaaaaaccgctgaataccctgatctctgctactggtctgtggatgagtcgtaccggaaccattcataaaatcaaacaccacgaggttagccgttcgaaaatctatattgagatggcgtgtggcgatcatctggttgtgaacaatagccgctcttctcgtacagcacgtgcactgcgtcaccacaaatatcgtaaaacctgtaaacgttgccgtgtgtccgatgaggatctgaacaaattcctgacaaaagccaatgaggaccaaacaagcgtgaaagtgaaagtcgttagcgctcctacccgtactaaaaaagcaatgccgaaatccgttgctcgtgcccctaaaccactggaaaacactgaagcagcacaggcacagccgtctggaagcaaattctctccggccattcctgtttctacccaggagtccgtttctgttccagcaagtgtgagcaccagcattagcagtattagcaccggtgccaccgctagcgccctggttaaaggcaataccaatccgattacaagcatgtctgccccggttcaagcatcagctccagcactgacaaaatcccaaaccgatcgtctggaggttctgctgaatccgaaagacgaaatcagcctgaattccggcaaaccgtttcgtgaactggagagcgaactgctgtcacgtcgtaaaaaagacctgcaacaaatctatgccgaagaacgtgagaactatctggggaaactggaacgtgaaatcacccgctttttcgtggatcgtggctttctggagatcaaatccccgattctgattcctctggagtatatcgagcgtatgggcatcgacaatgataccgaactgagcaaacaaattttccgtgtggataaaaacttctgtctgcgccctatgctagcaccaaatctggctaactatctgcgcaaactggaccgtgccctgcctgatcctatcaaaatcttcgagatcggcccgtgttatcgtaaagagtccgacggtaaagaacatctggaggagtttaccatgctgaacttttgccaaatgggttcaggttgtactcgtgagaacctggaaagcatcatcaccgattttctgaaccacctgggcattgacttcaaaattgtgggcgacagctgtatggtgtttggcgacaccctggatgtcatgcacggcgacctggaactgtctagtgccgttgtgggcccaatcccgctggatcgtgagtggggtatcgacaaaccttggatcggtgcgggttttggtctggagcgtctgctgaaagtaaaacacgacttcaagaacatcaaacgtgctgcacgttccgagtcctattacaatggtatttctactaacctgtaa

SEQ ID NO: 530 - protein, 1435 aa, Artificial Sequence
  Description of Artificial Sequence: Synthetic polypeptide
  KIF16B::FUS::SYNZIP1::PylRS(AF)
MASVKVAVRVRPMNRREKDLEAKFIIQMEKSKTTITNLKIPEGGTGDSGRERTKTFTYDFSFYSADTKSPDYVSQEMVFKTLGTDVVKSAFEGYNACVFAYGQTGSGKSYTMMGNSGDSGLIPRICEGLFSRINETTRWDEASFRTEVSYLEIYNERVRDLLRRKSSKTFNLRVREHPKEGPYVEDLSKHLVQNYGDVEELMDAGNINRTTAATGMNDVSSRSHAIFTIKFTQAKFDSEMPCETVSKIHLVDLAGSERADATGATGVRLKEGGNINKSLVTLGNVISALADLSQDAANTLAKKKQVFVPYRDSVLTWLLKDSLGGNSKTIMIATISPADVNYGETLSTLRYANRAKNIINKPTINEDANVKLIRELRAEIARLKTLLAQGNQIALLDSPTYTDIEMNRLGKGAPGSAGSAAGSGMASNDYTQQATQSYGAYPTQPGQGYSQQSSQPYGQQSYSGYSQSTDTSGYGQSSYSSYGQSQNTGYGTQSTPQGYGSTGGYGSSQSSQSSYGQQSSYPGYGQQPAPSSTSGSYGSSSQSSSYGQPQSGSYSQQPSYGGQQQSYGQQQSYNPPQGYGQQNQYNSSSGGGGGGGGGGNYGQDQSSMSSGGGSGGGYGNQDQSGGGGSGGYGQQDRGGRGRGGSGGGGGGGGGGYNRSSGGYEPRGRGGGRGGRGGMGGSDRGGFNKFGGPRDQGSRHDSEQDNSDNNTIFVQGLGENVTIESVADYFKQIGIIKTNKKTGQPMINLYTDRETGKLKGEATVSFDDPPSAKAAIDWFDGKEFSGNPIKVSFATRRADFNRGGGNGRGGRGRGGPMGRGGYGGGGSGGGGRGGFPSGGGGGGGQQRAGDWKCPNPTCENMNFSWRNECNQCKAPKPDGPGGGPGGSHMGGNYGDDRRGGRGGAIANLVAQLENEVASLENENETLKKKNLHKKDLIAYLEKEIANLRKKIEEGAPGSAGSAAGSGACPVPLQLPPLERLTLDDKKPLNTLISATGLWMSRTGTIHKIKHHEVSRSKIYIEMACGDHLVVNNSRSSRTARALRHHKYRKTCKRCRVSDEDLNKFLTKANEDQTSVKVKVVSAPTRTKKAMPKSVARAPKPLENTEAAQAQPSGSKFSPAIPVSTQESVSVPASVSTSISSISTGATASALVKGNTNPITSMSAPVQASAPALTKSQTDRLEVLLNPKDEISLNSGKPFRELESELLSRRKKDLQQIYAEERENYLGKLEREITRFFVDRGFLEIKSPILIPLEYIERMGIDNDTELSKQIFRVDKNFCLRPMLAPNLANYLRKLDRALPDPIKIFEIGPCYRKESDGKEHLEEFTMLNFCQMGSGCTRENLESIITDFLNHLGIDFKIVGDSCMVFGDTLDVMHGDLELSSAVVGPIPLDREWGIDKPWIGAGFGLERLLKVKHDFKNIKRAARSESYYNGISTNL

SEQ ID NO: 531 - DNA, 4308 bp, Artificial Sequence
  Description of Artificial Sequence: Synthetic polynucleotide
  KIF16B::FUS::SYNZIP1::PylRS(AA)
atggcatcggtcaaggtggccgtgagggtccggcccatgaatcgcagggaaaaggacttggaggccaagttcattattcagatggagaaaagcaaaacgacaatcacaaacttaaagataccagaaggaggcactggggactcaggaagagaacggaccaagaccttcacctatgacttttctttttattctgctgatacaaaaagcccagattacgtttcacaagaaatggttttcaaaaccctcggcacagatgtcgtgaagtctgcatttgaaggttataatgcttgtgtctttgcatatgggcaaactggatctggaaagtcatacactatgatgggaaattctggagattctggcttaatacctcggatctgtgaaggactcttcagtcggataaatgaaaccaccagatgggatgaagcttcttttcgaactgaagtcagctacttagaaatttataacgaacgtgtgagagatctacttcggcggaagtcatctaaaaccttcaatttgagagtccgtgagcatcccaaagaaggcccttatgttgaggatttatccaaacatttagtacagaattatggtgacgtagaagaacttatggatgcgggcaatatcaaccggaccaccgcagcgactgggatgaacgacgtcagtagcaggtctcatgccatcttcaccatcaagttcactcaggctaaatttgattctgaaatgccatgtgaaaccgtcagtaagatccacttggttgatcttgccggaagtgagcgtgcagatgccaccggagccaccggggttaggctaaaggaagggggaaatattaacaagtccctcgtgactctggggaacgtcatttctgccttagctgatttatctcaggatgctgcaaatactcttgcaaagaagaagcaagttttcgtgccttacagggattctgtgttgacttggttgttaaaagatagccttggaggaaactctaaaactatcatgattgccaccatttcacctgctgatgtcaattatggagaaaccctaagtactcttcgctatgcaaatagagccaaaaacatcatcaacaagcctaccattaatgaggatgccaacgtcaaacttatccgtgagctgcgagctgaaatagccagactgaaaacgctgcttgctcaagggaatcagattgccctcttagactcccccacatatacagatattgaaatgaacagattgggaaagggcgcccccggctccgccggctccgccgccggctccggcatggcctcaaacgattatacccaacaagcaacccaaagctatggggcctaccccacccagcccgggcagggctattcccagcagagcagtcagccctacggacagcagagttacagtggttatagccagtccacggacacttcaggatatggccagagcagctattcttcttatggccagagccagaacacaggctatggaactcagtcaactccccagggatatggctcgactggcggctatggcagtagccagagctcccaatcgtcttacgggcagcagtcctcctaccctggctatggccagcagccagctcccagcagcacctcgggaagttacggtagcagttctcagagcagcagctatgggcagccccagagtgggagctacagccagcagcctagctatggtggacagcagcaaagctatggacagcagcaaagctataatccccctcagggctatggacagcagaaccagtacaacagcagcagtggtggtggaggtggaggtggaggtggaggtaactatggccaagatcaatcctccatgagtagtggtggtggcagtggtggcggttatggcaatcaagaccagagtggtggaggtggcagcggtggctatggacagcaggaccgtggaggccgcggcaggggtggcagtggtggcggcggcggcggcggcggtggtggttacaaccgcagcagtggtggctatgaacccagaggtcgtggaggtggccgtggaggcagaggtggcatgggcggaagtgaccgtggtggcttcaataaatttggtggccctcgggaccaaggatcacgtcatgactccgaacaggataattcagacaacaacaccatctttgtgcaaggcctgggtgagaatgttacaattgagtctgtggctgattacttcaagcagattggtattattaagacaaacaagaaaacgggacagcccatgattaatttgtacacagacagggaaactggcaagctgaagggagaggcaacggtctcttttgatgacccaccttcagctaaagcagctattgactggtttgatggtaaagaattctccggaaatcctatcaaggtctcatttgctactcgccgggcagactttaatcggggtggtggcaatggtcgtggaggccgagggcgaggaggacccatgggccgtggaggctatggaggtggtggcagtggtggtggtggccgaggaggatttcccagtggaggtggtggcggtggaggacagcagcgagctggtgactggaagtgtcctaatcccacctgtgagaatatgaacttctcttggaggaatgaatgcaaccagtgtaaggcccctaaaccagatggcccaggagggggaccaggtggctctcacatggggggtaactacggggatgatcgtcgtggtggcagaggtggtgcgatcgcaaatctggtggcccagctggaaaacgaggtggccagcctggaaaacgagaacgaaaccctgaagaaaaagaacctgcacaagaaggacctgatcgcctacctggaaaaggaaatcgccaacctgagaaagaagatcgaggaaggagcaccaggaagtgctggttctgctgctggtagtggagcgtgcccggtgccgctgcagctgccgccgctggaacgcctgaccctggatgataaaaaaccgctgaataccctgatctctgctactggtctgtggatgagtcgtaccggaaccattcataaaatcaaacaccacgaggttagccgttcgaaaatctatattgagatggcgtgtggcgatcatctggttgtgaacaatagccgctcttctcgtacagcacgtgcactgcgtcaccacaaatatcgtaaaacctgtaaacgttgccgtgtgtccgatgaggatctgaacaaattcctgacaaaagccaatgaggaccaaacaagcgtgaaagtgaaagtcgttagcgctcctacccgtactaaaaaagcaatgccgaaatccgttgctcgtgcccctaaaccactggaaaacactgaagcagcacaggcacagccgtctggaagcaaattctctccggccattcctgtttctacccaggagtccgtttctgttccagcaagtgtgagcaccagcattagcagtattagcaccggtgccaccgctagcgccctggttaaaggcaataccaatccgattacaagcatgtctgccccggttcaagcatcagctccagcactgacaaaatcccaaaccgatcgtctggaggttctgctgaatccgaaagacgaaatcagcctgaattccggcaaaccgtttcgtgaactggagagcgaactgctgtcacgtcgtaaaaaagacctgcaacaaatctatgccgaagaacgtgagaactatctggggaaactggaacgtgaaatcacccgctttttcgtggatcgtggctttctggagatcaaatccccgattctgattcctctggagtatatcgagcgtatgggcatcgacaatgataccgaactgagcaaacaaattttccgtgtggataaaaacttctgtctgcgccctatgctggcaccaaatctgtataactatctgcgcaaactggaccgtgccctgcctgatcctatcaaaatcttcgagatcggcccgtgttatcgtaaagagtccgacggtaaagaacatctggaggagtttaccatgctggcctttgcccaaatgggttcaggttgtactcgtgagaacctggaaagcatcatcaccgattttctgaaccacctgggcattgacttcaaaattgtgggcgacagctgtatggtgtatggcgacaccctggatgtcatgcacggcgacctggaactgtctagtgccgttgttggaccaattccgctggaccgtgagtggggtatcgacaaaccgtggatcggagcaggattcggtctggaacgcctgctgaaagtgaaacacgacttcaaaaacatcaaacgtgccgcccgttctgaatcgtattataacgggatctctacgaacctgtaa

SEQ ID NO: 532 - protein, 1435 aa, Artificial Sequence
  Description of Artificial Sequence: Synthetic polypeptide
  KIF16B::FUS::SYNZIP1::PylRS(AA)
MASVKVAVRVRPMNRREKDLEAKFIIQMEKSKTTITNLKIPEGGTGDSGRERTKTFTYDFSFYSADTKSPDYVSQEMVFKTLGTDVVKSAFEGYNACVFAYGQTGSGKSYTMMGNSGDSGLIPRICEGLFSRINETTRWDEASFRTEVSYLEIYNERVRDLLRRKSSKTFNLRVREHPKEGPYVEDLSKHLVQNYGDVEELMDAGNINRTTAATGMNDVSSRSHAIFTIKFTQAKFDSEMPCETVSKIHLVDLAGSERADATGATGVRLKEGGNINKSLVTLGNVISALADLSQDAANTLAKKKQVFVPYRDSVLTWLLKDSLGGNSKTIMIATISPADVNYGETLSTLRYANRAKNIINKPTINEDANVKLIRELRAEIARLKTLLAQGNQIALLDSPTYTDIEMNRLGKGAPGSAGSAAGSGMASNDYTQQATQSYGAYPTQPGQGYSQQSSQPYGQQSYSGYSQSTDTSGYGQSSYSSYGQSQNTGYGTQSTPQGYGSTGGYGSSQSSQSSYGQQSSYPGYGQQPAPSSTSGSYGSSSQSSSYGQPQSGSYSQQPSYGGQQQSYGQQQSYNPPQGYGQQNQYNSSSGGGGGGGGGGNYGQDQSSMSSGGGSGGGYGNQDQSGGGGSGGYGQQDRGGRGRGGSGGGGGGGGGGYNRSSGGYEPRGRGGGRGGRGGMGGSDRGGFNKFGGPRDQGSRHDSEQDNSDNNTIFVQGLGENVTIESVADYFKQIGIIKTNKKTGQPMINLYTDRETGKLKGEATVSFDDPPSAKAAIDWFDGKEFSGNPIKVSFATRRADFNRGGGNGRGGRGRGGPMGRGGYGGGGSGGGGRGGFPSGGGGGGGQQRAGDWKCPNPTCENMNFSWRNECNQCKAPKPDGPGGGPGGSHMGGNYGDDRRGGRGGAIANLVAQLENEVASLENENETLKKKNLHKKDLIAYLEKEIANLRKKIEEGAPGSAGSAAGSGACPVPLQLPPLERLTLDDKKPLNTLISATGLWMSRTGTIHKIKHHEVSRSKIYIEMACGDHLVVNNSRSSRTARALRHHKYRKTCKRCRVSDEDLNKFLTKANEDQTSVKVKVVSAPTRTKKAMPKSVARAPKPLENTEAAQAQPSGSKFSPAIPVSTQESVSVPASVSTSISSISTGATASALVKGNTNPITSMSAPVQASAPALTKSQTDRLEVLLNPKDEISLNSGKPFRELESELLSRRKKDLQQIYAEERENYLGKLEREITRFFVDRGFLEIKSPILIPLEYIERMGIDNDTELSKQIFRVDKNFCLRPMLAPNLYNYLRKLDRALPDPIKIFEIGPCYRKESDGKEHLEEFTMLAFAQMGSGCTRENLESIITDFLNHLGIDFKIVGDSCMVYGDTLDVMHGDLELSSAVVGPIPLDREWGIDKPWIGAGFGLERLLKVKHDFKNIKRAARSESYYNGISTNL

SEQ ID NO: 533 - DNA, 2547 bp, Artificial Sequence
  Description of Artificial Sequence: Synthetic polynucleotide
  EBAG91-29::EWSR1::SYNZIP2::MCP
atggccatcacccagtttcggttatttaaattttgtacctgcctagcaacagtattctcattcctaaagagattaatatgcagatctatggcgtccacggattacagtacctatagccaagctgcagcgcagcagggctacagtgcttacaccgcccagcccactcaaggatatgcacagaccacccaggcatatgggcaacaaagctatggaacctatggacagcccactgatgtcagctatacccaggctcagaccactgcaacctatgggcagaccgcctatgcaacttcttatggacagcctcccactggttatactactccaactgccccccaggcatacagccagcctgtccaggggtatggcactggtgcttatgataccaccactgctacagtcaccaccacccaggcctcctatgcagctcagtctgcatatggcactcagcctgcttatccagcctatgggcagcagccagcagccactgcacctacaagaccgcaggatggaaacaagcccactgagactagtcaacctcaatctagcacagggggttacaaccagcccagcctaggatatggacagagtaactacagttatccccaggtacctgggagctaccccatgcagccagtcactgcacctccatcctaccctcctaccagctattcctctacacagccgactagttatgatcagagcagttactctcagcagaacacctatgggcaaccgagcagctatggacagcagagtagctatggtcaacaaagcagctatgggcagcagcctcccactagttacccaccccaaactggatcctacagccaagctccaagtcaatatagccaacagagcagcagctacgggcagcagagttcattccgacaggaccaccccagtagcatgggtgtttatgggcaggagtctggaggattttccggaccaggagagaaccggagcatgagtggccctgataaccggggcaggggaagagggggatttgatcgtggaggcatgagcagaggtgggcggggaggaggacgcggtggaatgggcagcgctggagagcgaggtggcttcaataagcctggtggacccatggatgaaggaccagatcttgatctaggcccacctgtagatccagatgaagactctgacaacagtgcaatttatgtacaaggattaaatgacagtgtgactctagatgatctggcagacttctttaagcagtgtggggttgttaagatgaacaagagaactgggcaacccatgatccacatctacctggacaaggaaacaggaaagcccaaaggcgatgccacagtgtcctatgaagacccacctactgccaaggctgccgtggaatggtttgatgggaaagattttcaagggagcaaacttaaagtctcccttgctcggaagaagcctccaatgaacagtatgcggggtggtctgccaccccgtgagggcagaggcatgccaccaccactccgtggaggtccaggaggcccaggaggtcctgggggacccatgggtcgcatgggaggccgtggaggagatagaggaggcttccctccaagaggaccccggggttcccgagggaacccctctggaggaggaaacgtccagcaccgagctggagactggcagtgtcccaatccgggttgtggaaaccagaacttcgcctggagaacagagtgcaaccagtgtaaggccccaaagcctgaaggcttcctcccgccaccctttccgcccccgggtggtgatcgtggcagaggtggccctggtggcatgcggggaggaagaggtggcctcatggatcgtggtggtcccggtggaatgttcagaggtggccgtggtggagacagaggtggcttccgtggtggccggggcatggaccgaggtggctttggtggaggaagacgaggtggccctggggggccccctggacctttgatggaacaggcgatcgcagctagaaacgcctacctgagaaagaaaatcgccagactgaagaaggacaacctgcagctggaaagagacgagcagaacctggaaaagatcatcgccaacctcagagatgagatcgccagactggaaaacgaggtggccagccacgagcagtatccctatgatgtgccggattatgctggagcaccaggaagtgctggttctgctgctggtagtggagcttctaactttactcagttcgttctcgtcgacaatggcggaactggcgacgtgactgtcgccccaagcaacttcgctaacgggatcgctgaatggatcagctctaactcgcgttcacaggcttacaaagtaacctgtagcgttcgtcagagctctgcgcagaatcgcaaatacaccatcaaagtcgaggtgcctaaaggcgcctggcgttcgtacttaaatatggaactaaccattccaattttcgccacgaattccgactgcgagcttattgttaaggcaatgcaaggtctcctaaaagatggaaacccgattccctcagcaatcgcagcaaactccggcatctactaa

SEQ ID NO: 534 - protein, 848 aa, Artificial Sequence
  Description of Artificial Sequence: Synthetic polypeptide
  EBAG91-29::EWSR1::SYNZIP2::MCP
MAITQFRLFKFCTCLATVFSFLKRLICRSMASTDYSTYSQAAAQQGYSAYTAQPTQGYAQTTQAYGQQSYGTYGQPTDVSYTQAQTTATYGQTAYATSYGQPPTGYTTPTAPQAYSQPVQGYGTGAYDTTTATVTTTQASYAAQSAYGTQPAYPAYGQQPAATAPTRPQDGNKPTETSQPQSSTGGYNQPSLGYGQSNYSYPQVPGSYPMQPVTAPPSYPPTSYSSTQPTSYDQSSYSQQNTYGQPSSYGQQSSYGQQSSYGQQPPTSYPPQTGSYSQAPSQYSQQSSSYGQQSSFRQDHPSSMGVYGQESGGFSGPGENRSMSGPDNRGRGRGGFDRGGMSRGGRGGGRGGMGSAGERGGFNKPGGPMDEGPDLDLGPPVDPDEDSDNSAIYVQGLNDSVTLDDLADFFKQCGVVKMNKRTGQPMIHIYLDKETGKPKGDATVSYEDPPTAKAAVEWFDGKDFQGSKLKVSLARKKPPMNSMRGGLPPREGRGMPPPLRGGPGGPGGPGGPMGRMGGRGGDRGGFPPRGPRGSRGNPSGGGNVQHRAGDWQCPNPGCGNQNFAWRTECNQCKAPKPEGFLPPPFPPPGGDRGRGGPGGMRGGRGGLMDRGGPGGMFRGGRGGDRGGFRGGRGMDRGGFGGGRRGGPGGPPGPLMEQAIAARNAYLRKKIARLKKDNLQLERDEQNLEKIIANLRDEIARLENEVASHEQYPYDVPDYAGAPGSAGSAAGSGASNFTQFVLVDNGGTGDVTVAPSNFANGIAEWISSNSRSQAYKVTCSVRQSSAQNRKYTIKVEVPKGAWRSYLNMELTIPIFATNSDCELIVKAMQGLLKDGNPIPSAIAANSGIY

SEQ ID NO: 535 - DNA, 2670 bp, Artificial Sequence
  Description of Artificial Sequence: Synthetic polynucleotide
  TOM20::EWSR1::SYNZIP2::MCP
atggtgggtcggaacagcgccatcgccgccggtgtatgcggggcccttttcattgggtactgcatctacttcgaccgcaaaagacgaagtgaccccaacttcaagaacaggcttcgagaacgaagaaagaaacagaagcttgccaaggagagagctgggctttccaagttacctgaccttaaagatgctgaagctgttcagaagttcttcatggcgtccacggattacagtacctatagccaagctgcagcgcagcagggctacagtgcttacaccgcccagcccactcaaggatatgcacagaccacccaggcatatgggcaacaaagctatggaacctatggacagcccactgatgtcagctatacccaggctcagaccactgcaacctatgggcagaccgcctatgcaacttcttatggacagcctcccactggttatactactccaactgccccccaggcatacagccagcctgtccaggggtatggcactggtgcttatgataccaccactgctacagtcaccaccacccaggcctcctatgcagctcagtctgcatatggcactcagcctgcttatccagcctatgggcagcagccagcagccactgcacctacaagaccgcaggatggaaacaagcccactgagactagtcaacctcaatctagcacagggggttacaaccagcccagcctaggatatggacagagtaactacagttatccccaggtacctgggagctaccccatgcagccagtcactgcacctccatcctaccctcctaccagctattcctctacacagccgactagttatgatcagagcagttactctcagcagaacacctatgggcaaccgagcagctatggacagcagagtagctatggtcaacaaagcagctatgggcagcagcctcccactagttacccaccccaaactggatcctacagccaagctccaagtcaatatagccaacagagcagcagctacgggcagcagagttcattccgacaggaccaccccagtagcatgggtgtttatgggcaggagtctggaggattttccggaccaggagagaaccggagcatgagtggccctgataaccggggcaggggaagagggggatttgatcgtggaggcatgagcagaggtgggcggggaggaggacgcggtggaatgggcagcgctggagagcgaggtggcttcaataagcctggtggacccatggatgaaggaccagatcttgatctaggcccacctgtagatccagatgaagactctgacaacagtgcaatttatgtacaaggattaaatgacagtgtgactctagatgatctggcagacttctttaagcagtgtggggttgttaagatgaacaagagaactgggcaacccatgatccacatctacctggacaaggaaacaggaaagcccaaaggcgatgccacagtgtcctatgaagacccacctactgccaaggctgccgtggaatggtttgatgggaaagattttcaagggagcaaacttaaagtctcccttgctcggaagaagcctccaatgaacagtatgcggggtggtctgccaccccgtgagggcagaggcatgccaccaccactccgtggaggtccaggaggcccaggaggtcctgggggacccatgggtcgcatgggaggccgtggaggagatagaggaggcttccctccaagaggaccccggggttcccgagggaacccctctggaggaggaaacgtccagcaccgagctggagactggcagtgtcccaatccgggttgtggaaaccagaacttcgcctggagaacagagtgcaaccagtgtaaggccccaaagcctgaaggcttcctcccgccaccctttccgcccccgggtggtgatcgtggcagaggtggccctggtggcatgcggggaggaagaggtggcctcatggatcgtggtggtcccggtggaatgttcagaggtggccgtggtggagacagaggtggcttccgtggtggccggggcatggaccgaggtggctttggtggaggaagacgaggtggccctggggggccccctggacctttgatggaacaggcgatcgcagctagaaacgcctacctgagaaagaaaatcgccagactgaagaaggacaacctgcagctggaaagagacgagcagaacctggaaaagatcatcgccaacctcagagatgagatcgccagactggaaaacgaggtggccagccacgagcagtatccctatgatgtgccggattatgctggagcaccaggaagtgctggttctgctgctggtagtggagcttctaactttactcagttcgttctcgtcgacaatggcggaactggcgacgtgactgtcgccccaagcaacttcgctaacgggatcgctgaatggatcagctctaactcgcgttcacaggcttacaaagtaacctgtagcgttcgtcagagctctgcgcagaatcgcaaatacaccatcaaagtcgaggtgcctaaaggcgcctggcgttcgtacttaaatatggaactaaccattccaattttcgccacgaattccgactgcgagcttattgttaaggcaatgcaaggtctcctaaaagatggaaacccgattccctcagcaatcgcagcaaactccggcatctactaa

SEQ ID NO: 536 - protein, 889 aa, Artificial Sequence
  Description of Artificial Sequence: Synthetic polypeptide
  TOM20::EWSR1::SYNZIP2::MCP
MVGRNSAIAAGVCGALFIGYCIYFDRKRRSDPNFKNRLRERRKKQKLAKERAGLSKLPDLKDAEAVQKFFMASTDYSTYSQAAAQQGYSAYTAQPTQGYAQTTQAYGQQSYGTYGQPTDVSYTQAQTTATYGQTAYATSYGQPPTGYTTPTAPQAYSQPVQGYGTGAYDTTTATVTTTQASYAAQSAYGTQPAYPAYGQQPAATAPTRPQDGNKPTETSQPQSSTGGYNQPSLGYGQSNYSYPQVPGSYPMQPVTAPPSYPPTSYSSTQPTSYDQSSYSQQNTYGQPSSYGQQSSYGQQSSYGQQPPTSYPPQTGSYSQAPSQYSQQSSSYGQQSSFRQDHPSSMGVYGQESGGFSGPGENRSMSGPDNRGRGRGGFDRGGMSRGGRGGGRGGMGSAGERGGFNKPGGPMDEGPDLDLGPPVDPDEDSDNSAIYVQGLNDSVTLDDLADFFKQCGVVKMNKRTGQPMIHIYLDKETGKPKGDATVSYEDPPTAKAAVEWFDGKDFQGSKLKVSLARKKPPMNSMRGGLPPREGRGMPPPLRGGPGGPGGPGGPMGRMGGRGGDRGGFPPRGPRGSRGNPSGGGNVQHRAGDWQCPNPGCGNQNFAWRTECNQCKAPKPEGFLPPPFPPPGGDRGRGGPGGMRGGRGGLMDRGGPGGMFRGGRGGDRGGFRGGRGMDRGGFGGGRRGGPGGPPGPLMEQAIAARNAYLRKKIARLKKDNLQLERDEQNLEKIIANLRDEIARLENEVASHEQYPYDVPDYAGAPGSAGSAAGSGASNFTQFVLVDNGGTGDVTVAPSNFANGIAEWISSNSRSQAYKVTCSVRQSSAQNRKYTIKVEVPKGAWRSYLNMELTIPIFATNSDCELIVKAMQGLLKDGNPIPSAIAANSGIY

SEQ ID NO: 537 - DNA, 3843 bp, Artificial Sequence
  Description of Artificial Sequence: Synthetic polynucleotide
  TOM20::FUS::SYNZIP4::4x?N22::PylRS(AA)
atggtgggtcggaacagcgccatcgccgccggtgtatgcggggcccttttcattgggtactgcatctacttcgaccgcaaaagacgaagtgaccccaacttcaagaacaggcttcgagaacgaagaaagaaacagaagcttgccaaggagagagctgggctttccaagttacctgaccttaaagatgctgaagctgttcagaaattcttcatggcctcaaacgattatacccaacaagcaacccaaagctatggggcctaccccacccagcccgggcagggctattcccagcagagcagtcagccctacggacagcagagttacagtggttatagccagtccacggacacttcaggatatggccagagcagctattcttcttatggccagagccagaacacaggctatggaactcagtcaactccccagggatatggctcgactggcggctatggcagtagccagagctcccaatcgtcttacgggcagcagtcctcctaccctggctatggccagcagccagctcccagcagcacctcgggaagttacggtagcagttctcagagcagcagctatgggcagccccagagtgggagctacagccagcagcctagctatggtggacagcagcaaagctatggacagcagcaaagctataatccccctcagggctatggacagcagaaccagtacaacagcagcagtggtggtggaggtggaggtggaggtggaggtaactatggccaagatcaatcctccatgagtagtggtggtggcagtggtggcggttatggcaatcaagaccagagtggtggaggtggcagcggtggctatggacagcaggaccgtggaggccgcggcaggggtggcagtggtggcggcggcggcggcggcggtggtggttacaaccgcagcagtggtggctatgaacccagaggtcgtggaggtggccgtggaggcagaggtggcatgggcggaagtgaccgtggtggcttcaataaatttggtggccctcgggaccaaggatcacgtcatgactccgaacaggataattcagacaacaacaccatctttgtgcaaggcctgggtgagaatgttacaattgagtctgtggctgattacttcaagcagattggtattattaagacaaacaagaaaacgggacagcccatgattaatttgtacacagacagggaaactggcaagctgaagggagaggcaacggtctcttttgatgacccaccttcagctaaagcagctattgactggtttgatggtaaagaattctccggaaatcctatcaaggtctcatttgctactcgccgggcagactttaatcggggtggtggcaatggtcgtggaggccgagggcgaggaggacccatgggccgtggaggctatggaggtggtggcagtggtggtggtggccgaggaggatttcccagtggaggtggtggcggtggaggacagcagcgagctggtgactggaagtgtcctaatcccacctgtgagaatatgaacttctcttggaggaatgaatgcaaccagtgtaaggcccctaaaccagatggcccaggagggggaccaggtggctctcacatggggggtaactacggggatgatcgtcgtggtggcagaggaggcgcgatcgcacaaaaggtggctgaactgaaaaatagagtggccgtgaagctgaaccggaacgagcagctgaagaacaaggtggaagagctgaagaacagaaacgcctacctgaagaatgagctggccaccctggaaaacgaggtggccagactggaaaacgacgtggccgagttaatcgcaggagcaccaggaagtgctggttctgctgctggtagtggagcatcgatagagcagaagctgatctcagaggaggacctgctagccaccatggacgcacaaacacgacgacgtgagcgtcgcgctgagaaacaagctcaatggaaagctgcaaacccaccgctcgacggagccggagctggcgctggagctggagccggagctggcggtctagccaccatggacgcacaaacacgacgacgtgagcgtcgcgctgagaaacaagctcaatggaaagctgcaaacccaccgctcgacggagccggagctggcgctggagctggagccggagctggcggtctagccaccatggacgcacaaacacgacgacgtgagcgtcgcgctgagaaacaagctcaatggaaagctgcaaacccaccgctcgacggagccggagctggcgctggagctggagccggagctggcggtctagccaccatggacgcacaaacacgacgacgtgagcgtcgcgctgagaaacaagctcaatggaaagctgcaaacccaccgctcgagtctagagggcccgttggtgctcctggttcagcaggaagcgcagcaggatcaggtgcgtgcccggtgccgctgcagctgccgccgctggaacgcctgaccctggatgacaaaaaaccgctgaataccctgatctctgctactggtctgtggatgagtcgtaccggaaccattcataaaatcaaacaccacgaggttagccgttcgaaaatctatattgagatggcgtgtggcgatcatctggttgtgaacaatagccgctcttctcgtacagcacgtgcactgcgtcaccacaaatatcgtaaaacctgtaaacgttgccgtgtgtccgatgaggatctgaacaaattcctgacaaaagccaatgaggaccaaacaagcgtgaaagtgaaagtcgttagcgctcctacccgtactaaaaaagcaatgccgaaatccgttgctcgtgcccctaaaccactggaaaacactgaagcagcacaggcacagccgtctggaagcaaattctctccggccattcctgtttctacccaggagtccgtttctgttccagcaagtgtgagcaccagcattagcagtattagcaccggtgccaccgctagcgccctggttaaaggcaataccaatccgattacaagcatgtctgccccggttcaagcatcagctccagcactgacaaaatcccaaaccgatcgtctggaggttctgctgaatccgaaagacgaaatcagcctgaattccggcaaaccgtttcgtgaactggagagcgaactgctgtcacgtcgtaaaaaagacctgcaacaaatctatgccgaagaacgtgagaactatctggggaaactggaacgtgaaatcacccgctttttcgtggatcgtggctttctggagatcaaatccccgattctgattcctctggagtatatcgagcgtatgggcatcgacaatgataccgaactgagcaaacaaattttccgtgtggataaaaacttctgtctgcgccctatgctggcaccaaatctgtataactatctgcgcaaactggaccgtgccctgcctgatcctatcaaaatcttcgagatcggcccgtgttatcgtaaagagtccgacggtaaagaacatctggaggagtttaccatgctggcctttgcccaaatgggttcaggttgtactcgtgagaacctggaaagcatcatcaccgattttctgaaccacctgggcattgacttcaaaattgtgggcgacagctgtatggtgtatggcgacaccctggatgtcatgcacggcgacctggaactgtctagtgccgttgttggaccaattccgctggaccgtgagtggggtatcgacaaaccgtggatcggagcaggattcggtctggaacgcctgctgaaagtgaaacacgacttcaaaaacatcaaacgtgccgcccgttctgaatcgtattataacgggatctctacgaacctgtaa

SEQ ID NO: 538 - protein, 1280 aa, Artificial Sequence
  Description of Artificial Sequence: Synthetic polypeptide
  TOM20::FUS::SYNZIP4::4x?N22::PylRS(AA)
MVGRNSAIAAGVCGALFIGYCIYFDRKRRSDPNFKNRLRERRKKQKLAKERAGLSKLPDLKDAEAVQKFFMASNDYTQQATQSYGAYPTQPGQGYSQQSSQPYGQQSYSGYSQSTDTSGYGQSSYSSYGQSQNTGYGTQSTPQGYGSTGGYGSSQSSQSSYGQQSSYPGYGQQPAPSSTSGSYGSSSQSSSYGQPQSGSYSQQPSYGGQQQSYGQQQSYNPPQGYGQQNQYNSSSGGGGGGGGGGNYGQDQSSMSSGGGSGGGYGNQDQSGGGGSGGYGQQDRGGRGRGGSGGGGGGGGGGYNRSSGGYEPRGRGGGRGGRGGMGGSDRGGFNKFGGPRDQGSRHDSEQDNSDNNTIFVQGLGENVTIESVADYFKQIGIIKTNKKTGQPMINLYTDRETGKLKGEATVSFDDPPSAKAAIDWFDGKEFSGNPIKVSFATRRADFNRGGGNGRGGRGRGGPMGRGGYGGGGSGGGGRGGFPSGGGGGGGQQRAGDWKCPNPTCENMNFSWRNECNQCKAPKPDGPGGGPGGSHMGGNYGDDRRGGRGGAIAQKVAELKNRVAVKLNRNEQLKNKVEELKNRNAYLKNELATLENEVARLENDVAELIAGAPGSAGSAAGSGASIEQKLISEEDLLATMDAQTRRRERRAEKQAQWKAANPPLDGAGAGAGAGAGAGGLATMDAQTRRRERRAEKQAQWKAANPPLDGAGAGAGAGAGAGGLATMDAQTRRRERRAEKQAQWKAANPPLDGAGAGAGAGAGAGGLATMDAQTRRRERRAEKQAQWKAANPPLESRGPVGAPGSAGSAAGSGACPVPLQLPPLERLTLDDKKPLNTLISATGLWMSRTGTIHKIKHHEVSRSKIYIEMACGDHLVVNNSRSSRTARALRHHKYRKTCKRCRVSDEDLNKFLTKANEDQTSVKVKVVSAPTRTKKAMPKSVARAPKPLENTEAAQAQPSGSKFSPAIPVSTQESVSVPASVSTSISSISTGATASALVKGNTNPITSMSAPVQASAPALTKSQTDRLEVLLNPKDEISLNSGKPFRELESELLSRRKKDLQQIYAEERENYLGKLEREITRFFVDRGFLEIKSPILIPLEYIERMGIDNDTELSKQIFRVDKNFCLRPMLAPNLYNYLRKLDRALPDPIKIFEIGPCYRKESDGKEHLEEFTMLAFAQMGSGCTRENLESIITDFLNHLGIDFKIVGDSCMVYGDTLDVMHGDLELSSAVVGPIPLDREWGIDKPWIGAGFGLERLLKVKHDFKNIKRAARSESYYNGISTNL

SEQ ID NO: 539 - DNA, 3816 bp, Artificial Sequence
  Description of Artificial Sequence: Synthetic polynucleotide
  KIF16B::EWSR1::SYNZIP4::4xlambdaN22
atggcatcggtcaaggtggccgtgagggtccggcccatgaatcgcagggaaaaggacttggaggccaagttcattattcagatggagaaaagcaaaacgacaatcacaaacttaaagataccagaaggaggcactggggactcaggaagagaacggaccaagaccttcacctatgacttttctttttattctgctgatacaaaaagcccagattacgtttcacaagaaatggttttcaaaaccctcggcacagatgtcgtgaagtctgcatttgaaggttataatgcttgtgtctttgcatatgggcaaactggatctggaaagtcatacactatgatgggaaattctggagattctggcttaatacctcggatctgtgaaggactcttcagtcggataaatgaaaccaccagatgggatgaagcttcttttcgaactgaagtcagctacttagaaatttataacgaacgtgtgagagatctacttcggcggaagtcatctaaaaccttcaatttgagagtccgtgagcatcccaaagaaggcccttatgttgaggatttatccaaacatttagtacagaattatggtgacgtagaagaacttatggatgcgggcaatatcaaccggaccaccgcagcgactgggatgaacgacgtcagtagcaggtctcatgccatcttcaccatcaagttcactcaggctaaatttgattctgaaatgccatgtgaaaccgtcagtaagatccacttggttgatcttgccggaagtgagcgtgcagatgccaccggagccaccggggttaggctaaaggaagggggaaatattaacaagtccctcgtgactctggggaacgtcatttctgccttagctgatttatctcaggatgctgcaaatactcttgcaaagaagaagcaagttttcgtgccttacagggattctgtgttgacttggttgttaaaagatagccttggaggaaactctaaaactatcatgattgccaccatttcacctgctgatgtcaattatggagaaaccctaagtactcttcgctatgcaaatagagccaaaaacatcatcaacaagcctaccattaatgaggatgccaacgtcaaacttatccgtgagctgcgagctgaaatagccagactgaaaacgctgcttgctcaagggaatcagattgccctcttagactcccccacaatggcgtccacggattacagtacctatagccaagctgcagcgcagcagggctacagtgcttacaccgcccagcccactcaaggatatgcacagaccacccaggcatatgggcaacaaagctatggaacctatggacagcccactgatgtcagctatacccaggctcagaccactgcaacctatgggcagaccgcctatgcaacttcttatggacagcctcccactggttatactactccaactgccccccaggcatacagccagcctgtccaggggtatggcactggtgcttatgataccaccactgctacagtcaccaccacccaggcctcctatgcagctcagtctgcatatggcactcagcctgcttatccagcctatgggcagcagccagcagccactgcacctacaagaccgcaggatggaaacaagcccactgagactagtcaacctcaatctagcacagggggttacaaccagcccagcctaggatatggacagagtaactacagttatccccaggtacctgggagctaccccatgcagccagtcactgcacctccatcctaccctcctaccagctattcctctacacagccgactagttatgatcagagcagttactctcagcagaacacctatgggcaaccgagcagctatggacagcagagtagctatggtcaacaaagcagctatgggcagcagcctcccactagttacccaccccaaactggatcctacagccaagctccaagtcaatatagccaacagagcagcagctacgggcagcagagttcattccgacaggaccaccccagtagcatgggtgtttatgggcaggagtctggaggattttccggaccaggagagaaccggagcatgagtggccctgataaccggggcaggggaagagggggatttgatcgtggaggcatgagcagaggtgggcggggaggaggacgcggtggaatgggcagcgctggagagcgaggtggcttcaataagcctggtggacccatggatgaaggaccagatcttgatctaggcccacctgtagatccagatgaagactctgacaacagtgcaatttatgtacaaggattaaatgacagtgtgactctagatgatctggcagacttctttaagcagtgtggggttgttaagatgaacaagagaactgggcaacccatgatccacatctacctggacaaggaaacaggaaagcccaaaggcgatgccacagtgtcctatgaagacccacctactgccaaggctgccgtggaatggtttgatgggaaagattttcaagggagcaaacttaaagtctcccttgctcggaagaagcctccaatgaacagtatgcggggtggtctgccaccccgtgagggcagaggcatgccaccaccactccgtggaggtccaggaggcccaggaggtcctgggggacccatgggtcgcatgggaggccgtggaggagatagaggaggcttccctccaagaggaccccggggttcccgagggaacccctctggaggaggaaacgtccagcaccgagctggagactggcagtgtcccaatccgggttgtggaaaccagaacttcgcctggagaacagagtgcaaccagtgtaaggccccaaagcctgaaggcttcctcccgccaccctttccgcccccgggtggtgatcgtggcagaggtggccctggtggcatgcggggaggaagaggtggcctcatggatcgtggtggtcccggtggaatgttcagaggtggccgtggtggagacagaggtggcttccgtggtggccggggcatggaccgaggtggctttggtggaggaagacgaggtggccctggggggccccctggacctttgatggaacaggcgatcgcacaaaaggtggctgaactgaaaaatagagtggccgtgaagctgaaccggaacgagcagctgaagaacaaggtggaagagctgaagaacagaaacgcctacctgaagaatgagctggccaccctggaaaacgaggtggccagactggaaaacgacgtggccgagggagcaccaggaagtgctggttctgctgctggtagtggagagcagaagctgatctcagaggaggacctgctagccaccatggacgcacaaacacgacgacgtgagcgtcgcgctgagaaacaagctcaatggaaagctgcaaacccaccgctcgacggagccggagctggcgctggagctggagccggagctggcggtctagccaccatggacgcacaaacacgacgacgtgagcgtcgcgctgagaaacaagctcaatggaaagctgcaaacccaccgctcgacggagccggagctggcgctggagctggagccggagctggcggtctagccaccatggacgcacaaacacgacgacgtgagcgtcgcgctgagaaacaagctcaatggaaagctgcaaacccaccgctcgacggagccggagctggcgctggagctggagccggagctggcggtctagccaccatggacgcacaaacacgacgacgtgagcgtcgcgctgagaaacaagctcaatggaaagctgcaaacccaccgctcgagtctagagggcccgtttaa

SEQ ID NO: 540 - protein, 1271 aa, Artificial Sequence
  Description of Artificial Sequence: Synthetic polypeptide
  KIF16B::EWSR1::SYNZIP4::4xlambdaN22
MASVKVAVRVRPMNRREKDLEAKFIIQMEKSKTTITNLKIPEGGTGDSGRERTKTFTYDFSFYSADTKSPDYVSQEMVFKTLGTDVVKSAFEGYNACVFAYGQTGSGKSYTMMGNSGDSGLIPRICEGLFSRINETTRWDEASFRTEVSYLEIYNERVRDLLRRKSSKTFNLRVREHPKEGPYVEDLSKHLVQNYGDVEELMDAGNINRTTAATGMNDVSSRSHAIFTIKFTQAKFDSEMPCETVSKIHLVDLAGSERADATGATGVRLKEGGNINKSLVTLGNVISALADLSQDAANTLAKKKQVFVPYRDSVLTWLLKDSLGGNSKTIMIATISPADVNYGETLSTLRYANRAKNIINKPTINEDANVKLIRELRAEIARLKTLLAQGNQIALLDSPTMASTDYSTYSQAAAQQGYSAYTAQPTQGYAQTTQAYGQQSYGTYGQPTDVSYTQAQTTATYGQTAYATSYGQPPTGYTTPTAPQAYSQPVQGYGTGAYDTTTATVTTTQASYAAQSAYGTQPAYPAYGQQPAATAPTRPQDGNKPTETSQPQSSTGGYNQPSLGYGQSNYSYPQVPGSYPMQPVTAPPSYPPTSYSSTQPTSYDQSSYSQQNTYGQPSSYGQQSSYGQQSSYGQQPPTSYPPQTGSYSQAPSQYSQQSSSYGQQSSFRQDHPSSMGVYGQESGGFSGPGENRSMSGPDNRGRGRGGFDRGGMSRGGRGGGRGGMGSAGERGGFNKPGGPMDEGPDLDLGPPVDPDEDSDNSAIYVQGLNDSVTLDDLADFFKQCGVVKMNKRTGQPMIHIYLDKETGKPKGDATVSYEDPPTAKAAVEWFDGKDFQGSKLKVSLARKKPPMNSMRGGLPPREGRGMPPPLRGGPGGPGGPGGPMGRMGGRGGDRGGFPPRGPRGSRGNPSGGGNVQHRAGDWQCPNPGCGNQNFAWRTECNQCKAPKPEGFLPPPFPPPGGDRGRGGPGGMRGGRGGLMDRGGPGGMFRGGRGGDRGGFRGGRGMDRGGFGGGRRGGPGGPPGPLMEQAIAQKVAELKNRVAVKLNRNEQLKNKVEELKNRNAYLKNELATLENEVARLENDVAEGAPGSAGSAAGSGEQKLISEEDLLATMDAQTRRRERRAEKQAQWKAANPPLDGAGAGAGAGAGAGGLATMDAQTRRRERRAEKQAQWKAANPPLDGAGAGAGAGAGAGGLATMDAQTRRRERRAEKQAQWKAANPPLDGAGAGAGAGAGAGGLATMDAQTRRRERRAEKQAQWKAANPPLESRGPV

SEQ ID NO: 541 - DNA, 2826 bp, Artificial Sequence
  Description of Artificial Sequence: Synthetic polynucleotide
  TOM20::EWSR1::SYNZP4::4xlambdaN22
atggtgggtcggaacagcgccatcgccgccggtgtatgcggggcccttttcattgggtactgcatctacttcgaccgcaaaagacgaagtgaccccaacttcaagaacaggcttcgagaacgaagaaagaaacagaagcttgccaaggagagagctgggctttccaagttacctgaccttaaagatgctgaagctgttcagaagttcttcatggcgtccacggattacagtacctatagccaagctgcagcgcagcagggctacagtgcttacaccgcccagcccactcaaggatatgcacagaccacccaggcatatgggcaacaaagctatggaacctatggacagcccactgatgtcagctatacccaggctcagaccactgcaacctatgggcagaccgcctatgcaacttcttatggacagcctcccactggttatactactccaactgccccccaggcatacagccagcctgtccaggggtatggcactggtgcttatgataccaccactgctacagtcaccaccacccaggcctcctatgcagctcagtctgcatatggcactcagcctgcttatccagcctatgggcagcagccagcagccactgcacctacaagaccgcaggatggaaacaagcccactgagactagtcaacctcaatctagcacagggggttacaaccagcccagcctaggatatggacagagtaactacagttatccccaggtacctgggagctaccccatgcagccagtcactgcacctccatcctaccctcctaccagctattcctctacacagccgactagttatgatcagagcagttactctcagcagaacacctatgggcaaccgagcagctatggacagcagagtagctatggtcaacaaagcagctatgggcagcagcctcccactagttacccaccccaaactggatcctacagccaagctccaagtcaatatagccaacagagcagcagctacgggcagcagagttcattccgacaggaccaccccagtagcatgggtgtttatgggcaggagtctggaggattttccggaccaggagagaaccggagcatgagtggccctgataaccggggcaggggaagagggggatttgatcgtggaggcatgagcagaggtgggcggggaggaggacgcggtggaatgggcagcgctggagagcgaggtggcttcaataagcctggtggacccatggatgaaggaccagatcttgatctaggcccacctgtagatccagatgaagactctgacaacagtgcaatttatgtacaaggattaaatgacagtgtgactctagatgatctggcagacttctttaagcagtgtggggttgttaagatgaacaagagaactgggcaacccatgatccacatctacctggacaaggaaacaggaaagcccaaaggcgatgccacagtgtcctatgaagacccacctactgccaaggctgccgtggaatggtttgatgggaaagattttcaagggagcaaacttaaagtctcccttgctcggaagaagcctccaatgaacagtatgcggggtggtctgccaccccgtgagggcagaggcatgccaccaccactccgtggaggtccaggaggcccaggaggtcctgggggacccatgggtcgcatgggaggccgtggaggagatagaggaggcttccctccaagaggaccccggggttcccgagggaacccctctggaggaggaaacgtccagcaccgagctggagactggcagtgtcccaatccgggttgtggaaaccagaacttcgcctggagaacagagtgcaaccagtgtaaggccccaaagcctgaaggcttcctcccgccaccctttccgcccccgggtggtgatcgtggcagaggtggccctggtggcatgcggggaggaagaggtggcctcatggatcgtggtggtcccggtggaatgttcagaggtggccgtggtggagacagaggtggcttccgtggtggccggggcatggaccgaggtggctttggtggaggaagacgaggtggccctggggggccccctggacctttgatggaacaggcgatcgcacaaaaggtggctgaactgaaaaatagagtggccgtgaagctgaaccggaacgagcagctgaagaacaaggtggaagagctgaagaacagaaacgcctacctgaagaatgagctggccaccctggaaaacgaggtggccagactggaaaacgacgtggccgagggagcaccaggaagtgctggttctgctgctggtagtggagagcagaagctgatctcagaggaggacctgctagccaccatggacgcacaaacacgacgacgtgagcgtcgcgctgagaaacaagctcaatggaaagctgcaaacccaccgctcgacggagccggagctggcgctggagctggagccggagctggcggtctagccaccatggacgcacaaacacgacgacgtgagcgtcgcgctgagaaacaagctcaatggaaagctgcaaacccaccgctcgacggagccggagctggcgctggagctggagccggagctggcggtctagccaccatggacgcacaaacacgacgacgtgagcgtcgcgctgagaaacaagctcaatggaaagctgcaaacccaccgctcgacggagccggagctggcgctggagctggagccggagctggcggtctagccaccatggacgcacaaacacgacgacgtgagcgtcgcgctgagaaacaagctcaatggaaagctgcaaacccaccgctcgagtctagagggcccgtttaa

SEQ ID NO: 542 - protein, 941 aa, Artificial Sequence
  Description of Artificial Sequence: Synthetic polypeptide
  TOM20::EWSR1::SYNZP4::4xlambdaN22
MVGRNSAIAAGVCGALFIGYCIYFDRKRRSDPNFKNRLRERRKKQKLAKERAGLSKLPDLKDAEAVQKFFMASTDYSTYSQAAAQQGYSAYTAQPTQGYAQTTQAYGQQSYGTYGQPTDVSYTQAQTTATYGQTAYATSYGQPPTGYTTPTAPQAYSQPVQGYGTGAYDTTTATVTTTQASYAAQSAYGTQPAYPAYGQQPAATAPTRPQDGNKPTETSQPQSSTGGYNQPSLGYGQSNYSYPQVPGSYPMQPVTAPPSYPPTSYSSTQPTSYDQSSYSQQNTYGQPSSYGQQSSYGQQSSYGQQPPTSYPPQTGSYSQAPSQYSQQSSSYGQQSSFRQDHPSSMGVYGQESGGFSGPGENRSMSGPDNRGRGRGGFDRGGMSRGGRGGGRGGMGSAGERGGFNKPGGPMDEGPDLDLGPPVDPDEDSDNSAIYVQGLNDSVTLDDLADFFKQCGVVKMNKRTGQPMIHIYLDKETGKPKGDATVSYEDPPTAKAAVEWFDGKDFQGSKLKVSLARKKPPMNSMRGGLPPREGRGMPPPLRGGPGGPGGPGGPMGRMGGRGGDRGGFPPRGPRGSRGNPSGGGNVQHRAGDWQCPNPGCGNQNFAWRTECNQCKAPKPEGFLPPPFPPPGGDRGRGGPGGMRGGRGGLMDRGGPGGMFRGGRGGDRGGFRGGRGMDRGGFGGGRRGGPGGPPGPLMEQAIAQKVAELKNRVAVKLNRNEQLKNKVEELKNRNAYLKNELATLENEVARLENDVAEGAPGSAGSAAGSGEQKLISEEDLLATMDAQTRRRERRAEKQAQWKAANPPLDGAGAGAGAGAGAGGLATMDAQTRRRERRAEKQAQWKAANPPLDGAGAGAGAGAGAGGLATMDAQTRRRERRAEKQAQWKAANPPLDGAGAGAGAGAGAGGLATMDAQTRRRERRAEKQAQWKAANPPLESRGPV

SEQ ID NO: 543 - DNA, 3288 bp, Artificial Sequence
  Description of Artificial Sequence: Synthetic polynucleotide
  TOM20::FUS::SYNZIP1::PylRS(AF)
atggtgggtcggaacagcgccatcgccgccggtgtatgcggggcccttttcattgggtactgcatctacttcgaccgcaaaagacgaagtgaccccaacttcaagaacaggcttcgagaacgaagaaagaaacagaagcttgccaaggagagagctgggctttccaagttacctgaccttaaagatgctgaagctgttcagaaattcttcatggcctcaaacgattatacccaacaagcaacccaaagctatggggcctaccccacccagcccgggcagggctattcccagcagagcagtcagccctacggacagcagagttacagtggttatagccagtccacggacacttcaggatatggccagagcagctattcttcttatggccagagccagaacacaggctatggaactcagtcaactccccagggatatggctcgactggcggctatggcagtagccagagctcccaatcgtcttacgggcagcagtcctcctaccctggctatggccagcagccagctcccagcagcacctcgggaagttacggtagcagttctcagagcagcagctatgggcagccccagagtgggagctacagccagcagcctagctatggtggacagcagcaaagctatggacagcagcaaagctataatccccctcagggctatggacagcagaaccagtacaacagcagcagtggtggtggaggtggaggtggaggtggaggtaactatggccaagatcaatcctccatgagtagtggtggtggcagtggtggcggttatggcaatcaagaccagagtggtggaggtggcagcggtggctatggacagcaggaccgtggaggccgcggcaggggtggcagtggtggcggcggcggcggcggcggtggtggttacaaccgcagcagtggtggctatgaacccagaggtcgtggaggtggccgtggaggcagaggtggcatgggcggaagtgaccgtggtggcttcaataaatttggtggccctcgggaccaaggatcacgtcatgactccgaacaggataattcagacaacaacaccatctttgtgcaaggcctgggtgagaatgttacaattgagtctgtggctgattacttcaagcagattggtattattaagacaaacaagaaaacgggacagcccatgattaatttgtacacagacagggaaactggcaagctgaagggagaggcaacggtctcttttgatgacccaccttcagctaaagcagctattgactggtttgatggtaaagaattctccggaaatcctatcaaggtctcatttgctactcgccgggcagactttaatcggggtggtggcaatggtcgtggaggccgagggcgaggaggacccatgggccgtggaggctatggaggtggtggcagtggtggtggtggccgaggaggatttcccagtggaggtggtggcggtggaggacagcagcgagctggtgactggaagtgtcctaatcccacctgtgagaatatgaacttctcttggaggaatgaatgcaaccagtgtaaggcccctaaaccagatggcccaggagggggaccaggtggctctcacatggggggtaactacggggatgatcgtcgtggtggcagaggaggcgcgatcgcaaatctggtggcccagctggaaaacgaggtggccagcctggaaaacgagaacgaaaccctgaagaaaaagaacctgcacaagaaggacctgatcgcctacctggaaaaggaaatcgccaacctgagaaagaagatcgaggaaggcaagcctattcccaaccccctgctgggcctggatagcaccggagcaccaggaagtgctggttctgctgctggtagtggagcgtgcccggtgccgctgcagctgccgccgctggaacgcctgaccctggatgataaaaaaccgctgaataccctgatctctgctactggtctgtggatgagtcgtaccggaaccattcataaaatcaaacaccacgaggttagccgttcgaaaatctatattgagatggcgtgtggcgatcatctggttgtgaacaatagccgctcttctcgtacagcacgtgcactgcgtcaccacaaatatcgtaaaacctgtaaacgttgccgtgtgtccgatgaggatctgaacaaattcctgacaaaagccaatgaggaccaaacaagcgtgaaagtgaaagtcgttagcgctcctacccgtactaaaaaagcaatgccgaaatccgttgctcgtgcccctaaaccactggaaaacactgaagcagcacaggcacagccgtctggaagcaaattctctccggccattcctgtttctacccaggagtccgtttctgttccagcaagtgtgagcaccagcattagcagtattagcaccggtgccaccgctagcgccctggttaaaggcaataccaatccgattacaagcatgtctgccccggttcaagcatcagctccagcactgacaaaatcccaaaccgatcgtctggaggttctgctgaatccgaaagacgaaatcagcctgaattccggcaaaccgtttcgtgaactggagagcgaactgctgtcacgtcgtaaaaaagacctgcaacaaatctatgccgaagaacgtgagaactatctggggaaactggaacgtgaaatcacccgctttttcgtggatcgtggctttctggagatcaaatccccgattctgattcctctggagtatatcgagcgtatgggcatcgacaatgataccgaactgagcaaacaaattttccgtgtggataaaaacttctgtctgcgccctatgctagcaccaaatctggctaactatctgcgcaaactggaccgtgccctgcctgatcctatcaaaatcttcgagatcggcccgtgttatcgtaaagagtccgacggtaaagaacatctggaggagtttaccatgctgaacttttgccaaatgggttcaggttgtactcgtgagaacctggaaagcatcatcaccgattttctgaaccacctgggcattgacttcaaaattgtgggcgacagctgtatggtgtttggcgacaccctggatgtcatgcacggcgacctggaactgtctagtgccgttgtgggcccaatcccgctggatcgtgagtggggtatcgacaaaccttggatcggtgcgggttttggtctggagcgtctgctgaaagtaaaacacgacttcaagaacatcaaacgtgctgcacgttccgagtcctattacaatggtatttctactaacctgtaa

SEQ ID NO: 544 - protein, 1095 aa, Artificial Sequence
  Description of Artificial Sequence: Synthetic polypeptide
  TOM20::FUS::SYNZIP1::PylRS(AF)
MVGRNSAIAAGVCGALFIGYCIYFDRKRRSDPNFKNRLRERRKKQKLAKERAGLSKLPDLKDAEAVQKFFMASNDYTQQATQSYGAYPTQPGQGYSQQSSQPYGQQSYSGYSQSTDTSGYGQSSYSSYGQSQNTGYGTQSTPQGYGSTGGYGSSQSSQSSYGQQSSYPGYGQQPAPSSTSGSYGSSSQSSSYGQPQSGSYSQQPSYGGQQQSYGQQQSYNPPQGYGQQNQYNSSSGGGGGGGGGGNYGQDQSSMSSGGGSGGGYGNQDQSGGGGSGGYGQQDRGGRGRGGSGGGGGGGGGGYNRSSGGYEPRGRGGGRGGRGGMGGSDRGGFNKFGGPRDQGSRHDSEQDNSDNNTIFVQGLGENVTIESVADYFKQIGIIKTNKKTGQPMINLYTDRETGKLKGEATVSFDDPPSAKAAIDWFDGKEFSGNPIKVSFATRRADFNRGGGNGRGGRGRGGPMGRGGYGGGGSGGGGRGGFPSGGGGGGGQQRAGDWKCPNPTCENMNFSWRNECNQCKAPKPDGPGGGPGGSHMGGNYGDDRRGGRGGAIANLVAQLENEVASLENENETLKKKNLHKKDLIAYLEKEIANLRKKIEEGKPIPNPLLGLDSTGAPGSAGSAAGSGACPVPLQLPPLERLTLDDKKPLNTLISATGLWMSRTGTIHKIKHHEVSRSKIYIEMACGDHLVVNNSRSSRTARALRHHKYRKTCKRCRVSDEDLNKFLTKANEDQTSVKVKVVSAPTRTKKAMPKSVARAPKPLENTEAAQAQPSGSKFSPAIPVSTQESVSVPASVSTSISSISTGATASALVKGNTNPITSMSAPVQASAPALTKSQTDRLEVLLNPKDEISLNSGKPFRELESELLSRRKKDLQQIYAEERENYLGKLEREITRFFVDRGFLEIKSPILIPLEYIERMGIDNDTELSKQIFRVDKNFCLRPMLAPNLANYLRKLDRALPDPIKIFEIGPCYRKESDGKEHLEEFTMLNFCQMGSGCTRENLESIITDFLNHLGIDFKIVGDSCMVFGDTLDVMHGDLELSSAVVGPIPLDREWGIDKPWIGAGFGLERLLKVKHDFKNIKRAARSESYYNGISTNL

SEQ ID NO: 545 - DNA, 3273 bp, Artificial Sequence
  Description of Artificial Sequence: Synthetic polynucleotide
  TOM20::FUS::SYNZIP::3::PylRS(AF)
atggtgggtcggaacagcgccatcgccgccggtgtatgcggggcccttttcattgggtactgcatctacttcgaccgcaaaagacgaagtgaccccaacttcaagaacaggcttcgagaacgaagaaagaaacagaagcttgccaaggagagagctgggctttccaagttacctgaccttaaagatgctgaagctgttcagaaattcttcatggcctcaaacgattatacccaacaagcaacccaaagctatggggcctaccccacccagcccgggcagggctattcccagcagagcagtcagccctacggacagcagagttacagtggttatagccagtccacggacacttcaggatatggccagagcagctattcttcttatggccagagccagaacacaggctatggaactcagtcaactccccagggatatggctcgactggcggctatggcagtagccagagctcccaatcgtcttacgggcagcagtcctcctaccctggctatggccagcagccagctcccagcagcacctcgggaagttacggtagcagttctcagagcagcagctatgggcagccccagagtgggagctacagccagcagcctagctatggtggacagcagcaaagctatggacagcagcaaagctataatccccctcagggctatggacagcagaaccagtacaacagcagcagtggtggtggaggtggaggtggaggtggaggtaactatggccaagatcaatcctccatgagtagtggtggtggcagtggtggcggttatggcaatcaagaccagagtggtggaggtggcagcggtggctatggacagcaggaccgtggaggccgcggcaggggtggcagtggtggcggcggcggcggcggcggtggtggttacaaccgcagcagtggtggctatgaacccagaggtcgtggaggtggccgtggaggcagaggtggcatgggcggaagtgaccgtggtggcttcaataaatttggtggccctcgggaccaaggatcacgtcatgactccgaacaggataattcagacaacaacaccatctttgtgcaaggcctgggtgagaatgttacaattgagtctgtggctgattacttcaagcagattggtattattaagacaaacaagaaaacgggacagcccatgattaatttgtacacagacagggaaactggcaagctgaagggagaggcaacggtctcttttgatgacccaccttcagctaaagcagctattgactggtttgatggtaaagaattctccggaaatcctatcaaggtctcatttgctactcgccgggcagactttaatcggggtggtggcaatggtcgtggaggccgagggcgaggaggacccatgggccgtggaggctatggaggtggtggcagtggtggtggtggccgaggaggatttcccagtggaggtggtggcggtggaggacagcagcgagctggtgactggaagtgtcctaatcccacctgtgagaatatgaacttctcttggaggaatgaatgcaaccagtgtaaggcccctaaaccagatggcccaggagggggaccaggtggctctcacatggggggtaactacggggatgatcgtcgtggtggcagaggaggcgcgatcgcaaatgaggtgaccaccctggaaaacgacgccgccttcatcgagaacgagaacgcctacctggaaaaagagatcgccagactgagaaaggaaaaggccgctctgcggaacagactggcccacaagaagggcaagcctattcccaaccccctgctgggcctggatagcaccggagcaccaggaagtgctggttctgctgctggtagtggagcgtgcccggtgccgctgcagctgccgccgctggaacgcctgaccctggatgataaaaaaccgctgaataccctgatctctgctactggtctgtggatgagtcgtaccggaaccattcataaaatcaaacaccacgaggttagccgttcgaaaatctatattgagatggcgtgtggcgatcatctggttgtgaacaatagccgctcttctcgtacagcacgtgcactgcgtcaccacaaatatcgtaaaacctgtaaacgttgccgtgtgtccgatgaggatctgaacaaattcctgacaaaagccaatgaggaccaaacaagcgtgaaagtgaaagtcgttagcgctcctacccgtactaaaaaagcaatgccgaaatccgttgctcgtgcccctaaaccactggaaaacactgaagcagcacaggcacagccgtctggaagcaaattctctccggccattcctgtttctacccaggagtccgtttctgttccagcaagtgtgagcaccagcattagcagtattagcaccggtgccaccgctagcgccctggttaaaggcaataccaatccgattacaagcatgtctgccccggttcaagcatcagctccagcactgacaaaatcccaaaccgatcgtctggaggttctgctgaatccgaaagacgaaatcagcctgaattccggcaaaccgtttcgtgaactggagagcgaactgctgtcacgtcgtaaaaaagacctgcaacaaatctatgccgaagaacgtgagaactatctggggaaactggaacgtgaaatcacccgctttttcgtggatcgtggctttctggagatcaaatccccgattctgattcctctggagtatatcgagcgtatgggcatcgacaatgataccgaactgagcaaacaaattttccgtgtggataaaaacttctgtctgcgccctatgctagcaccaaatctggctaactatctgcgcaaactggaccgtgccctgcctgatcctatcaaaatcttcgagatcggcccgtgttatcgtaaagagtccgacggtaaagaacatctggaggagtttaccatgctgaacttttgccaaatgggttcaggttgtactcgtgagaacctggaaagcatcatcaccgattttctgaaccacctgggcattgacttcaaaattgtgggcgacagctgtatggtgtttggcgacaccctggatgtcatgcacggcgacctggaactgtctagtgccgttgtgggcccaatcccgctggatcgtgagtggggtatcgacaaaccttggatcggtgcgggttttggtctggagcgtctgctgaaagtaaaacacgacttcaagaacatcaaacgtgctgcacgttccgagtcctattacaatggtatttctactaacctgtaa

SEQ ID NO: 546 - protein, 1090 aa, Artificial Sequence
  Description of Artificial Sequence: Synthetic polypeptide
  TOM20::FUS::SYNZIP::3::PylRS(AF)
MVGRNSAIAAGVCGALFIGYCIYFDRKRRSDPNFKNRLRERRKKQKLAKERAGLSKLPDLKDAEAVQKFFMASNDYTQQATQSYGAYPTQPGQGYSQQSSQPYGQQSYSGYSQSTDTSGYGQSSYSSYGQSQNTGYGTQSTPQGYGSTGGYGSSQSSQSSYGQQSSYPGYGQQPAPSSTSGSYGSSSQSSSYGQPQSGSYSQQPSYGGQQQSYGQQQSYNPPQGYGQQNQYNSSSGGGGGGGGGGNYGQDQSSMSSGGGSGGGYGNQDQSGGGGSGGYGQQDRGGRGRGGSGGGGGGGGGGYNRSSGGYEPRGRGGGRGGRGGMGGSDRGGFNKFGGPRDQGSRHDSEQDNSDNNTIFVQGLGENVTIESVADYFKQIGIIKTNKKTGQPMINLYTDRETGKLKGEATVSFDDPPSAKAAIDWFDGKEFSGNPIKVSFATRRADFNRGGGNGRGGRGRGGPMGRGGYGGGGSGGGGRGGFPSGGGGGGGQQRAGDWKCPNPTCENMNFSWRNECNQCKAPKPDGPGGGPGGSHMGGNYGDDRRGGRGGAIANEVTTLENDAAFIENENAYLEKEIARLRKEKAALRNRLAHKKGKPIPNPLLGLDSTGAPGSAGSAAGSGACPVPLQLPPLERLTLDDKKPLNTLISATGLWMSRTGTIHKIKHHEVSRSKIYIEMACGDHLVVNNSRSSRTARALRHHKYRKTCKRCRVSDEDLNKFLTKANEDQTSVKVKVVSAPTRTKKAMPKSVARAPKPLENTEAAQAQPSGSKFSPAIPVSTQESVSVPASVSTSISSISTGATASALVKGNTNPITSMSAPVQASAPALTKSQTDRLEVLLNPKDEISLNSGKPFRELESELLSRRKKDLQQIYAEERENYLGKLEREITRFFVDRGFLEIKSPILIPLEYIERMGIDNDTELSKQIFRVDKNFCLRPMLAPNLANYLRKLDRALPDPIKIFEIGPCYRKESDGKEHLEEFTMLNFCQMGSGCTRENLESIITDFLNHLGIDFKIVGDSCMVFGDTLDVMHGDLELSSAVVGPIPLDREWGIDKPWIGAGFGLERLLKVKHDFKNIKRAARSESYYNGISTNL

SEQ ID NO: 547 - DNA, 3192 bp, Artificial Sequence
  Description of Artificial Sequence: Synthetic polynucleotide
  EBAG91-29::FUS::SYNZIP1::PylRS(AF)
atggccatcacccagtttcggttatttaaattttgtacctgcctagcaacagtattctcattcctaaagagattaatatgcagatctggagcacccggctccgccggctccgccgccggctccggcatggcctcaaacgattatacccaacaagcaacccaaagctatggggcctaccccacccagcccgggcagggctattcccagcagagcagtcagccctacggacagcagagttacagtggttatagccagtccacggacacttcaggatatggccagagcagctattcttcttatggccagagccagaacacaggctatggaactcagtcaactccccagggatatggctcgactggcggctatggcagtagccagagctcccaatcgtcttacgggcagcagtcctcctaccctggctatggccagcagccagctcccagcagcacctcgggaagttacggtagcagttctcagagcagcagctatgggcagccccagagtgggagctacagccagcagcctagctatggtggacagcagcaaagctatggacagcagcaaagctataatccccctcagggctatggacagcagaaccagtacaacagcagcagtggtggtggaggtggaggtggaggtggaggtaactatggccaagatcaatcctccatgagtagtggtggtggcagtggtggcggttatggcaatcaagaccagagtggtggaggtggcagcggtggctatggacagcaggaccgtggaggccgcggcaggggtggcagtggtggcggcggcggcggcggcggtggtggttacaaccgcagcagtggtggctatgaacccagaggtcgtggaggtggccgtggaggcagaggtggcatgggcggaagtgaccgtggtggcttcaataaatttggtggccctcgggaccaaggatcacgtcatgactccgaacaggataattcagacaacaacaccatctttgtgcaaggcctgggtgagaatgttacaattgagtctgtggctgattacttcaagcagattggtattattaagacaaacaagaaaacgggacagcccatgattaatttgtacacagacagggaaactggcaagctgaagggagaggcaacggtctcttttgatgacccaccttcagctaaagcagctattgactggtttgatggtaaagaattctccggaaatcctatcaaggtctcatttgctactcgccgggcagactttaatcggggtggtggcaatggtcgtggaggccgagggcgaggaggacccatgggccgtggaggctatggaggtggtggcagtggtggtggtggccgaggaggatttcccagtggaggtggtggcggtggaggacagcagcgagctggtgactggaagtgtcctaatcccacctgtgagaatatgaacttctcttggaggaatgaatgcaaccagtgtaaggcccctaaaccagatggcccaggagggggaccaggtggctctcacatggggggtaactacggggatgatcgtcgtggtggcagaggtggtgcgatcgcaaatctggtggcccagctggaaaacgaggtggccagcctggaaaacgagaacgaaaccctgaagaaaaagaacctgcacaagaaggacctgatcgcctacctggaaaaggaaatcgccaacctgagaaagaagatcgaggaaggcgccgattacaaggacgatgatgacaagggagcaccaggaagtgctggttctgctgctggtagtggagcgtgcccggtgccgctgcagctgccgccgctggaacgcctgaccctggatgataaaaaaccgctgaataccctgatctctgctactggtctgtggatgagtcgtaccggaaccattcataaaatcaaacaccacgaggttagccgttcgaaaatctatattgagatggcgtgtggcgatcatctggttgtgaacaatagccgctcttctcgtacagcacgtgcactgcgtcaccacaaatatcgtaaaacctgtaaacgttgccgtgtgtccgatgaggatctgaacaaattcctgacaaaagccaatgaggaccaaacaagcgtgaaagtgaaagtcgttagcgctcctacccgtactaaaaaagcaatgccgaaatccgttgctcgtgcccctaaaccactggaaaacactgaagcagcacaggcacagccgtctggaagcaaattctctccggccattcctgtttctacccaggagtccgtttctgttccagcaagtgtgagcaccagcattagcagtattagcaccggtgccaccgctagcgccctggttaaaggcaataccaatccgattacaagcatgtctgccccggttcaagcatcagctccagcactgacaaaatcccaaaccgatcgtctggaggttctgctgaatccgaaagacgaaatcagcctgaattccggcaaaccgtttcgtgaactggagagcgaactgctgtcacgtcgtaaaaaagacctgcaacaaatctatgccgaagaacgtgagaactatctggggaaactggaacgtgaaatcacccgctttttcgtggatcgtggctttctggagatcaaatccccgattctgattcctctggagtatatcgagcgtatgggcatcgacaatgataccgaactgagcaaacaaattttccgtgtggataaaaacttctgtctgcgccctatgctagcaccaaatctggctaactatctgcgcaaactggaccgtgccctgcctgatcctatcaaaatcttcgagatcggcccgtgttatcgtaaagagtccgacggtaaagaacatctggaggagtttaccatgctgaacttttgccaaatgggttcaggttgtactcgtgagaacctggaaagcatcatcaccgattttctgaaccacctgggcattgacttcaaaattgtgggcgacagctgtatggtgtttggcgacaccctggatgtcatgcacggcgacctggaactgtctagtgccgttgtgggcccaatcccgctggatcgtgagtggggtatcgacaaaccttggatcggtgcgggttttggtctggagcgtctgctgaaagtaaaacacgacttcaagaacatcaaacgtgctgcacgttccgagtcctattacaatggtatttctactaacctgtaa

SEQ ID NO: 548 - protein, 1063 aa, Artificial Sequence
  Description of Artificial Sequence: Synthetic polypeptide
  EBAG91-29::FUS::SYNZIP1::PylRS(AF)
MAITQFRLFKFCTCLATVFSFLKRLICRSGAPGSAGSAAGSGMASNDYTQQATQSYGAYPTQPGQGYSQQSSQPYGQQSYSGYSQSTDTSGYGQSSYSSYGQSQNTGYGTQSTPQGYGSTGGYGSSQSSQSSYGQQSSYPGYGQQPAPSSTSGSYGSSSQSSSYGQPQSGSYSQQPSYGGQQQSYGQQQSYNPPQGYGQQNQYNSSSGGGGGGGGGGNYGQDQSSMSSGGGSGGGYGNQDQSGGGGSGGYGQQDRGGRGRGGSGGGGGGGGGGYNRSSGGYEPRGRGGGRGGRGGMGGSDRGGFNKFGGPRDQGSRHDSEQDNSDNNTIFVQGLGENVTIESVADYFKQIGIIKTNKKTGQPMINLYTDRETGKLKGEATVSFDDPPSAKAAIDWFDGKEFSGNPIKVSFATRRADFNRGGGNGRGGRGRGGPMGRGGYGGGGSGGGGRGGFPSGGGGGGGQQRAGDWKCPNPTCENMNFSWRNECNQCKAPKPDGPGGGPGGSHMGGNYGDDRRGGRGGAIANLVAQLENEVASLENENETLKKKNLHKKDLIAYLEKEIANLRKKIEEGADYKDDDDKGAPGSAGSAAGSGACPVPLQLPPLERLTLDDKKPLNTLISATGLWMSRTGTIHKIKHHEVSRSKIYIEMACGDHLVVNNSRSSRTARALRHHKYRKTCKRCRVSDEDLNKFLTKANEDQTSVKVKVVSAPTRTKKAMPKSVARAPKPLENTEAAQAQPSGSKFSPAIPVSTQESVSVPASVSTSISSISTGATASALVKGNTNPITSMSAPVQASAPALTKSQTDRLEVLLNPKDEISLNSGKPFRELESELLSRRKKDLQQIYAEERENYLGKLEREITRFFVDRGFLEIKSPILIPLEYIERMGIDNDTELSKQIFRVDKNFCLRPMLAPNLANYLRKLDRALPDPIKIFEIGPCYRKESDGKEHLEEFTMLNFCQMGSGCTRENLESIITDFLNHLGIDFKIVGDSCMVFGDTLDVMHGDLELSSAVVGPIPLDREWGIDKPWIGAGFGLERLLKVKHDFKNIKRAARSESYYNGISTNL

SEQ ID NO: 549 - DNA, 3177 bp, Artificial Sequence
  Description of Artificial Sequence: Synthetic polynucleotide
  EBAG91-29::FUS::SYNZIP3::PylRS(AF)
atggccatcacccagtttcggttatttaaattttgtacctgcctagcaacagtattctcattcctaaagagattaatatgcagatctggagcacccggctccgccggctccgccgccggctccggcatggcctcaaacgattatacccaacaagcaacccaaagctatggggcctaccccacccagcccgggcagggctattcccagcagagcagtcagccctacggacagcagagttacagtggttatagccagtccacggacacttcaggatatggccagagcagctattcttcttatggccagagccagaacacaggctatggaactcagtcaactccccagggatatggctcgactggcggctatggcagtagccagagctcccaatcgtcttacgggcagcagtcctcctaccctggctatggccagcagccagctcccagcagcacctcgggaagttacggtagcagttctcagagcagcagctatgggcagccccagagtgggagctacagccagcagcctagctatggtggacagcagcaaagctatggacagcagcaaagctataatccccctcagggctatggacagcagaaccagtacaacagcagcagtggtggtggaggtggaggtggaggtggaggtaactatggccaagatcaatcctccatgagtagtggtggtggcagtggtggcggttatggcaatcaagaccagagtggtggaggtggcagcggtggctatggacagcaggaccgtggaggccgcggcaggggtggcagtggtggcggcggcggcggcggcggtggtggttacaaccgcagcagtggtggctatgaacccagaggtcgtggaggtggccgtggaggcagaggtggcatgggcggaagtgaccgtggtggcttcaataaatttggtggccctcgggaccaaggatcacgtcatgactccgaacaggataattcagacaacaacaccatctttgtgcaaggcctgggtgagaatgttacaattgagtctgtggctgattacttcaagcagattggtattattaagacaaacaagaaaacgggacagcccatgattaatttgtacacagacagggaaactggcaagctgaagggagaggcaacggtctcttttgatgacccaccttcagctaaagcagctattgactggtttgatggtaaagaattctccggaaatcctatcaaggtctcatttgctactcgccgggcagactttaatcggggtggtggcaatggtcgtggaggccgagggcgaggaggacccatgggccgtggaggctatggaggtggtggcagtggtggtggtggccgaggaggatttcccagtggaggtggtggcggtggaggacagcagcgagctggtgactggaagtgtcctaatcccacctgtgagaatatgaacttctcttggaggaatgaatgcaaccagtgtaaggcccctaaaccagatggcccaggagggggaccaggtggctctcacatggggggtaactacggggatgatcgtcgtggtggcagaggtggtgcgatcgcaaatgaggtgaccaccctggaaaacgacgccgccttcatcgagaacgagaacgcctacctggaaaaagagatcgccagactgagaaaggaaaaggccgctctgcggaacagactggcccacaagaagggcgccgattacaaggacgatgatgacaagggagcaccaggaagtgctggttctgctgctggtagtggagcgtgcccggtgccgctgcagctgccgccgctggaacgcctgaccctggatgataaaaaaccgctgaataccctgatctctgctactggtctgtggatgagtcgtaccggaaccattcataaaatcaaacaccacgaggttagccgttcgaaaatctatattgagatggcgtgtggcgatcatctggttgtgaacaatagccgctcttctcgtacagcacgtgcactgcgtcaccacaaatatcgtaaaacctgtaaacgttgccgtgtgtccgatgaggatctgaacaaattcctgacaaaagccaatgaggaccaaacaagcgtgaaagtgaaagtcgttagcgctcctacccgtactaaaaaagcaatgccgaaatccgttgctcgtgcccctaaaccactggaaaacactgaagcagcacaggcacagccgtctggaagcaaattctctccggccattcctgtttctacccaggagtccgtttctgttccagcaagtgtgagcaccagcattagcagtattagcaccggtgccaccgctagcgccctggttaaaggcaataccaatccgattacaagcatgtctgccccggttcaagcatcagctccagcactgacaaaatcccaaaccgatcgtctggaggttctgctgaatccgaaagacgaaatcagcctgaattccggcaaaccgtttcgtgaactggagagcgaactgctgtcacgtcgtaaaaaagacctgcaacaaatctatgccgaagaacgtgagaactatctggggaaactggaacgtgaaatcacccgctttttcgtggatcgtggctttctggagatcaaatccccgattctgattcctctggagtatatcgagcgtatgggcatcgacaatgataccgaactgagcaaacaaattttccgtgtggataaaaacttctgtctgcgccctatgctagcaccaaatctggctaactatctgcgcaaactggaccgtgccctgcctgatcctatcaaaatcttcgagatcggcccgtgttatcgtaaagagtccgacggtaaagaacatctggaggagtttaccatgctgaacttttgccaaatgggttcaggttgtactcgtgagaacctggaaagcatcatcaccgattttctgaaccacctgggcattgacttcaaaattgtgggcgacagctgtatggtgtttggcgacaccctggatgtcatgcacggcgacctggaactgtctagtgccgttgtgggcccaatcccgctggatcgtgagtggggtatcgacaaaccttggatcggtgcgggttttggtctggagcgtctgctgaaagtaaaacacgacttcaagaacatcaaacgtgctgcacgttccgagtcctattacaatggtatttctactaacctgtaa

SEQ ID NO: 550 - protein, 1058 aa, Artificial Sequence
  Description of Artificial Sequence: Synthetic polypeptide
  EBAG91-29::FUS::SYNZIP3::PylRS(AF)
MAITQFRLFKFCTCLATVFSFLKRLICRSGAPGSAGSAAGSGMASNDYTQQATQSYGAYPTQPGQGYSQQSSQPYGQQSYSGYSQSTDTSGYGQSSYSSYGQSQNTGYGTQSTPQGYGSTGGYGSSQSSQSSYGQQSSYPGYGQQPAPSSTSGSYGSSSQSSSYGQPQSGSYSQQPSYGGQQQSYGQQQSYNPPQGYGQQNQYNSSSGGGGGGGGGGNYGQDQSSMSSGGGSGGGYGNQDQSGGGGSGGYGQQDRGGRGRGGSGGGGGGGGGGYNRSSGGYEPRGRGGGRGGRGGMGGSDRGGFNKFGGPRDQGSRHDSEQDNSDNNTIFVQGLGENVTIESVADYFKQIGIIKTNKKTGQPMINLYTDRETGKLKGEATVSFDDPPSAKAAIDWFDGKEFSGNPIKVSFATRRADFNRGGGNGRGGRGRGGPMGRGGYGGGGSGGGGRGGFPSGGGGGGGQQRAGDWKCPNPTCENMNFSWRNECNQCKAPKPDGPGGGPGGSHMGGNYGDDRRGGRGGAIANEVTTLENDAAFIENENAYLEKEIARLRKEKAALRNRLAHKKGADYKDDDDKGAPGSAGSAAGSGACPVPLQLPPLERLTLDDKKPLNTLISATGLWMSRTGTIHKIKHHEVSRSKIYIEMACGDHLVVNNSRSSRTARALRHHKYRKTCKRCRVSDEDLNKFLTKANEDQTSVKVKVVSAPTRTKKAMPKSVARAPKPLENTEAAQAQPSGSKFSPAIPVSTQESVSVPASVSTSISSISTGATASALVKGNTNPITSMSAPVQASAPALTKSQTDRLEVLLNPKDEISLNSGKPFRELESELLSRRKKDLQQIYAEERENYLGKLEREITRFFVDRGFLEIKSPILIPLEYIERMGIDNDTELSKQIFRVDKNFCLRPMLAPNLANYLRKLDRALPDPIKIFEIGPCYRKESDGKEHLEEFTMLNFCQMGSGCTRENLESIITDFLNHLGIDFKIVGDSCMVFGDTLDVMHGDLELSSAVVGPIPLDREWGIDKPWIGAGFGLERLLKVKHDFKNIKRAARSESYYNGISTNL

SEQ ID NO: 551 - DNA, 3288 bp, Artificial Sequence
  Description of Artificial Sequence: Synthetic polynucleotide
  TOM20::FUS::SYNZIP1::PylRS(AA)
atggtgggtcggaacagcgccatcgccgccggtgtatgcggggcccttttcattgggtactgcatctacttcgaccgcaaaagacgaagtgaccccaacttcaagaacaggcttcgagaacgaagaaagaaacagaagcttgccaaggagagagctgggctttccaagttacctgaccttaaagatgctgaagctgttcagaaattcttcatggcctcaaacgattatacccaacaagcaacccaaagctatggggcctaccccacccagcccgggcagggctattcccagcagagcagtcagccctacggacagcagagttacagtggttatagccagtccacggacacttcaggatatggccagagcagctattcttcttatggccagagccagaacacaggctatggaactcagtcaactccccagggatatggctcgactggcggctatggcagtagccagagctcccaatcgtcttacgggcagcagtcctcctaccctggctatggccagcagccagctcccagcagcacctcgggaagttacggtagcagttctcagagcagcagctatgggcagccccagagtgggagctacagccagcagcctagctatggtggacagcagcaaagctatggacagcagcaaagctataatccccctcagggctatggacagcagaaccagtacaacagcagcagtggtggtggaggtggaggtggaggtggaggtaactatggccaagatcaatcctccatgagtagtggtggtggcagtggtggcggttatggcaatcaagaccagagtggtggaggtggcagcggtggctatggacagcaggaccgtggaggccgcggcaggggtggcagtggtggcggcggcggcggcggcggtggtggttacaaccgcagcagtggtggctatgaacccagaggtcgtggaggtggccgtggaggcagaggtggcatgggcggaagtgaccgtggtggcttcaataaatttggtggccctcgggaccaaggatcacgtcatgactccgaacaggataattcagacaacaacaccatctttgtgcaaggcctgggtgagaatgttacaattgagtctgtggctgattacttcaagcagattggtattattaagacaaacaagaaaacgggacagcccatgattaatttgtacacagacagggaaactggcaagctgaagggagaggcaacggtctcttttgatgacccaccttcagctaaagcagctattgactggtttgatggtaaagaattctccggaaatcctatcaaggtctcatttgctactcgccgggcagactttaatcggggtggtggcaatggtcgtggaggccgagggcgaggaggacccatgggccgtggaggctatggaggtggtggcagtggtggtggtggccgaggaggatttcccagtggaggtggtggcggtggaggacagcagcgagctggtgactggaagtgtcctaatcccacctgtgagaatatgaacttctcttggaggaatgaatgcaaccagtgtaaggcccctaaaccagatggcccaggagggggaccaggtggctctcacatggggggtaactacggggatgatcgtcgtggtggcagaggaggcgcgatcgcaaatctggtggcccagctggaaaacgaggtggccagcctggaaaacgagaacgaaaccctgaagaaaaagaacctgcacaagaaggacctgatcgcctacctggaaaaggaaatcgccaacctgagaaagaagatcgaggaaggcaagcctattcccaaccccctgctgggcctggatagcaccggagcaccaggaagtgctggttctgctgctggtagtggagcgtgcccggtgccgctgcagctgccgccgctggaacgcctgaccctggatgacaaaaaaccgctgaataccctgatctctgctactggtctgtggatgagtcgtaccggaaccattcataaaatcaaacaccacgaggttagccgttcgaaaatctatattgagatggcgtgtggcgatcatctggttgtgaacaatagccgctcttctcgtacagcacgtgcactgcgtcaccacaaatatcgtaaaacctgtaaacgttgccgtgtgtccgatgaggatctgaacaaattcctgacaaaagccaatgaggaccaaacaagcgtgaaagtgaaagtcgttagcgctcctacccgtactaaaaaagcaatgccgaaatccgttgctcgtgcccctaaaccactggaaaacactgaagcagcacaggcacagccgtctggaagcaaattctctccggccattcctgtttctacccaggagtccgtttctgttccagcaagtgtgagcaccagcattagcagtattagcaccggtgccaccgctagcgccctggttaaaggcaataccaatccgattacaagcatgtctgccccggttcaagcatcagctccagcactgacaaaatcccaaaccgatcgtctggaggttctgctgaatccgaaagacgaaatcagcctgaattccggcaaaccgtttcgtgaactggagagcgaactgctgtcacgtcgtaaaaaagacctgcaacaaatctatgccgaagaacgtgagaactatctggggaaactggaacgtgaaatcacccgctttttcgtggatcgtggctttctggagatcaaatccccgattctgattcctctggagtatatcgagcgtatgggcatcgacaatgataccgaactgagcaaacaaattttccgtgtggataaaaacttctgtctgcgccctatgctggcaccaaatctgtataactatctgcgcaaactggaccgtgccctgcctgatcctatcaaaatcttcgagatcggcccgtgttatcgtaaagagtccgacggtaaagaacatctggaggagtttaccatgctggcctttgcccaaatgggttcaggttgtactcgtgagaacctggaaagcatcatcaccgattttctgaaccacctgggcattgacttcaaaattgtgggcgacagctgtatggtgtatggcgacaccctggatgtcatgcacggcgacctggaactgtctagtgccgttgttggaccaattccgctggaccgtgagtggggtatcgacaaaccgtggatcggagcaggattcggtctggaacgcctgctgaaagtgaaacacgacttcaaaaacatcaaacgtgccgcccgttctgaatcgtattataacgggatctctacgaacctgtaa

SEQ ID NO: 552 - protein, 1095 aa, Artificial Sequence
  Description of Artificial Sequence: Synthetic polypeptide
  TOM20::FUS::SYNZIP1::PylRS(AA)
MVGRNSAIAAGVCGALFIGYCIYFDRKRRSDPNFKNRLRERRKKQKLAKERAGLSKLPDLKDAEAVQKFFMASNDYTQQATQSYGAYPTQPGQGYSQQSSQPYGQQSYSGYSQSTDTSGYGQSSYSSYGQSQNTGYGTQSTPQGYGSTGGYGSSQSSQSSYGQQSSYPGYGQQPAPSSTSGSYGSSSQSSSYGQPQSGSYSQQPSYGGQQQSYGQQQSYNPPQGYGQQNQYNSSSGGGGGGGGGGNYGQDQSSMSSGGGSGGGYGNQDQSGGGGSGGYGQQDRGGRGRGGSGGGGGGGGGGYNRSSGGYEPRGRGGGRGGRGGMGGSDRGGFNKFGGPRDQGSRHDSEQDNSDNNTIFVQGLGENVTIESVADYFKQIGIIKTNKKTGQPMINLYTDRETGKLKGEATVSFDDPPSAKAAIDWFDGKEFSGNPIKVSFATRRADFNRGGGNGRGGRGRGGPMGRGGYGGGGSGGGGRGGFPSGGGGGGGQQRAGDWKCPNPTCENMNFSWRNECNQCKAPKPDGPGGGPGGSHMGGNYGDDRRGGRGGAIANLVAQLENEVASLENENETLKKKNLHKKDLIAYLEKEIANLRKKIEEGKPIPNPLLGLDSTGAPGSAGSAAGSGACPVPLQLPPLERLTLDDKKPLNTLISATGLWMSRTGTIHKIKHHEVSRSKIYIEMACGDHLVVNNSRSSRTARALRHHKYRKTCKRCRVSDEDLNKFLTKANEDQTSVKVKVVSAPTRTKKAMPKSVARAPKPLENTEAAQAQPSGSKFSPAIPVSTQESVSVPASVSTSISSISTGATASALVKGNTNPITSMSAPVQASAPALTKSQTDRLEVLLNPKDEISLNSGKPFRELESELLSRRKKDLQQIYAEERENYLGKLEREITRFFVDRGFLEIKSPILIPLEYIERMGIDNDTELSKQIFRVDKNFCLRPMLAPNLYNYLRKLDRALPDPIKIFEIGPCYRKESDGKEHLEEFTMLAFAQMGSGCTRENLESIITDFLNHLGIDFKIVGDSCMVYGDTLDVMHGDLELSSAVVGPIPLDREWGIDKPWIGAGFGLERLLKVKHDFKNIKRAARSESYYNGISTNL

SEQ ID NO: 553 - DNA, 3273 bp, Artificial Sequence
  Description of Artificial Sequence: Synthetic polynucleotide
  TOM20::FUS::SYNZIP3::PylRS(AA)
atggtgggtcggaacagcgccatcgccgccggtgtatgcggggcccttttcattgggtactgcatctacttcgaccgcaaaagacgaagtgaccccaacttcaagaacaggcttcgagaacgaagaaagaaacagaagcttgccaaggagagagctgggctttccaagttacctgaccttaaagatgctgaagctgttcagaaattcttcatggcctcaaacgattatacccaacaagcaacccaaagctatggggcctaccccacccagcccgggcagggctattcccagcagagcagtcagccctacggacagcagagttacagtggttatagccagtccacggacacttcaggatatggccagagcagctattcttcttatggccagagccagaacacaggctatggaactcagtcaactccccagggatatggctcgactggcggctatggcagtagccagagctcccaatcgtcttacgggcagcagtcctcctaccctggctatggccagcagccagctcccagcagcacctcgggaagttacggtagcagttctcagagcagcagctatgggcagccccagagtgggagctacagccagcagcctagctatggtggacagcagcaaagctatggacagcagcaaagctataatccccctcagggctatggacagcagaaccagtacaacagcagcagtggtggtggaggtggaggtggaggtggaggtaactatggccaagatcaatcctccatgagtagtggtggtggcagtggtggcggttatggcaatcaagaccagagtggtggaggtggcagcggtggctatggacagcaggaccgtggaggccgcggcaggggtggcagtggtggcggcggcggcggcggcggtggtggttacaaccgcagcagtggtggctatgaacccagaggtcgtggaggtggccgtggaggcagaggtggcatgggcggaagtgaccgtggtggcttcaataaatttggtggccctcgggaccaaggatcacgtcatgactccgaacaggataattcagacaacaacaccatctttgtgcaaggcctgggtgagaatgttacaattgagtctgtggctgattacttcaagcagattggtattattaagacaaacaagaaaacgggacagcccatgattaatttgtacacagacagggaaactggcaagctgaagggagaggcaacggtctcttttgatgacccaccttcagctaaagcagctattgactggtttgatggtaaagaattctccggaaatcctatcaaggtctcatttgctactcgccgggcagactttaatcggggtggtggcaatggtcgtggaggccgagggcgaggaggacccatgggccgtggaggctatggaggtggtggcagtggtggtggtggccgaggaggatttcccagtggaggtggtggcggtggaggacagcagcgagctggtgactggaagtgtcctaatcccacctgtgagaatatgaacttctcttggaggaatgaatgcaaccagtgtaaggcccctaaaccagatggcccaggagggggaccaggtggctctcacatggggggtaactacggggatgatcgtcgtggtggcagaggaggcgcgatcgcaaatgaggtgaccaccctggaaaacgacgccgccttcatcgagaacgagaacgcctacctggaaaaagagatcgccagactgagaaaggaaaaggccgctctgcggaacagactggcccacaagaagggcaagcctattcccaaccccctgctgggcctggatagcaccggagcaccaggaagtgctggttctgctgctggtagtggagcgtgcccggtgccgctgcagctgccgccgctggaacgcctgaccctggatgacaaaaaaccgctgaataccctgatctctgctactggtctgtggatgagtcgtaccggaaccattcataaaatcaaacaccacgaggttagccgttcgaaaatctatattgagatggcgtgtggcgatcatctggttgtgaacaatagccgctcttctcgtacagcacgtgcactgcgtcaccacaaatatcgtaaaacctgtaaacgttgccgtgtgtccgatgaggatctgaacaaattcctgacaaaagccaatgaggaccaaacaagcgtgaaagtgaaagtcgttagcgctcctacccgtactaaaaaagcaatgccgaaatccgttgctcgtgcccctaaaccactggaaaacactgaagcagcacaggcacagccgtctggaagcaaattctctccggccattcctgtttctacccaggagtccgtttctgttccagcaagtgtgagcaccagcattagcagtattagcaccggtgccaccgctagcgccctggttaaaggcaataccaatccgattacaagcatgtctgccccggttcaagcatcagctccagcactgacaaaatcccaaaccgatcgtctggaggttctgctgaatccgaaagacgaaatcagcctgaattccggcaaaccgtttcgtgaactggagagcgaactgctgtcacgtcgtaaaaaagacctgcaacaaatctatgccgaagaacgtgagaactatctggggaaactggaacgtgaaatcacccgctttttcgtggatcgtggctttctggagatcaaatccccgattctgattcctctggagtatatcgagcgtatgggcatcgacaatgataccgaactgagcaaacaaattttccgtgtggataaaaacttctgtctgcgccctatgctggcaccaaatctgtataactatctgcgcaaactggaccgtgccctgcctgatcctatcaaaatcttcgagatcggcccgtgttatcgtaaagagtccgacggtaaagaacatctggaggagtttaccatgctggcctttgcccaaatgggttcaggttgtactcgtgagaacctggaaagcatcatcaccgattttctgaaccacctgggcattgacttcaaaattgtgggcgacagctgtatggtgtatggcgacaccctggatgtcatgcacggcgacctggaactgtctagtgccgttgttggaccaattccgctggaccgtgagtggggtatcgacaaaccgtggatcggagcaggattcggtctggaacgcctgctgaaagtgaaacacgacttcaaaaacatcaaacgtgccgcccgttctgaatcgtattataacgggatctctacgaacctgtaa

SEQ ID NO: 554 - protein, 1090 aa, Artificial Sequence
  Description of Artificial Sequence: Synthetic polypeptide
  TOM20::FUS::SYNZIP3::PylRS(AA)
MVGRNSAIAAGVCGALFIGYCIYFDRKRRSDPNFKNRLRERRKKQKLAKERAGLSKLPDLKDAEAVQKFFMASNDYTQQATQSYGAYPTQPGQGYSQQSSQPYGQQSYSGYSQSTDTSGYGQSSYSSYGQSQNTGYGTQSTPQGYGSTGGYGSSQSSQSSYGQQSSYPGYGQQPAPSSTSGSYGSSSQSSSYGQPQSGSYSQQPSYGGQQQSYGQQQSYNPPQGYGQQNQYNSSSGGGGGGGGGGNYGQDQSSMSSGGGSGGGYGNQDQSGGGGSGGYGQQDRGGRGRGGSGGGGGGGGGGYNRSSGGYEPRGRGGGRGGRGGMGGSDRGGFNKFGGPRDQGSRHDSEQDNSDNNTIFVQGLGENVTIESVADYFKQIGIIKTNKKTGQPMINLYTDRETGKLKGEATVSFDDPPSAKAAIDWFDGKEFSGNPIKVSFATRRADFNRGGGNGRGGRGRGGPMGRGGYGGGGSGGGGRGGFPSGGGGGGGQQRAGDWKCPNPTCENMNFSWRNECNQCKAPKPDGPGGGPGGSHMGGNYGDDRRGGRGGAIANEVTTLENDAAFIENENAYLEKEIARLRKEKAALRNRLAHKKGKPIPNPLLGLDSTGAPGSAGSAAGSGACPVPLQLPPLERLTLDDKKPLNTLISATGLWMSRTGTIHKIKHHEVSRSKIYIEMACGDHLVVNNSRSSRTARALRHHKYRKTCKRCRVSDEDLNKFLTKANEDQTSVKVKVVSAPTRTKKAMPKSVARAPKPLENTEAAQAQPSGSKFSPAIPVSTQESVSVPASVSTSISSISTGATASALVKGNTNPITSMSAPVQASAPALTKSQTDRLEVLLNPKDEISLNSGKPFRELESELLSRRKKDLQQIYAEERENYLGKLEREITRFFVDRGFLEIKSPILIPLEYIERMGIDNDTELSKQIFRVDKNFCLRPMLAPNLYNYLRKLDRALPDPIKIFEIGPCYRKESDGKEHLEEFTMLAFAQMGSGCTRENLESIITDFLNHLGIDFKIVGDSCMVYGDTLDVMHGDLELSSAVVGPIPLDREWGIDKPWIGAGFGLERLLKVKHDFKNIKRAARSESYYNGISTNL

SEQ ID NO: 555 - DNA, 3273 bp, Artificial Sequence
  Description of Artificial Sequence: Synthetic polynucleotide
  TOM20::FUS::SYNZIP3::PylRS(AAAF)
atggtgggtcggaacagcgccatcgccgccggtgtatgcggggcccttttcattgggtactgcatctacttcgaccgcaaaagacgaagtgaccccaacttcaagaacaggcttcgagaacgaagaaagaaacagaagcttgccaaggagagagctgggctttccaagttacctgaccttaaagatgctgaagctgttcagaaattcttcatggcctcaaacgattatacccaacaagcaacccaaagctatggggcctaccccacccagcccgggcagggctattcccagcagagcagtcagccctacggacagcagagttacagtggttatagccagtccacggacacttcaggatatggccagagcagctattcttcttatggccagagccagaacacaggctatggaactcagtcaactccccagggatatggctcgactggcggctatggcagtagccagagctcccaatcgtcttacgggcagcagtcctcctaccctggctatggccagcagccagctcccagcagcacctcgggaagttacggtagcagttctcagagcagcagctatgggcagccccagagtgggagctacagccagcagcctagctatggtggacagcagcaaagctatggacagcagcaaagctataatccccctcagggctatggacagcagaaccagtacaacagcagcagtggtggtggaggtggaggtggaggtggaggtaactatggccaagatcaatcctccatgagtagtggtggtggcagtggtggcggttatggcaatcaagaccagagtggtggaggtggcagcggtggctatggacagcaggaccgtggaggccgcggcaggggtggcagtggtggcggcggcggcggcggcggtggtggttacaaccgcagcagtggtggctatgaacccagaggtcgtggaggtggccgtggaggcagaggtggcatgggcggaagtgaccgtggtggcttcaataaatttggtggccctcgggaccaaggatcacgtcatgactccgaacaggataattcagacaacaacaccatctttgtgcaaggcctgggtgagaatgttacaattgagtctgtggctgattacttcaagcagattggtattattaagacaaacaagaaaacgggacagcccatgattaatttgtacacagacagggaaactggcaagctgaagggagaggcaacggtctcttttgatgacccaccttcagctaaagcagctattgactggtttgatggtaaagaattctccggaaatcctatcaaggtctcatttgctactcgccgggcagactttaatcggggtggtggcaatggtcgtggaggccgagggcgaggaggacccatgggccgtggaggctatggaggtggtggcagtggtggtggtggccgaggaggatttcccagtggaggtggtggcggtggaggacagcagcgagctggtgactggaagtgtcctaatcccacctgtgagaatatgaacttctcttggaggaatgaatgcaaccagtgtaaggcccctaaaccagatggcccaggagggggaccaggtggctctcacatggggggtaactacggggatgatcgtcgtggtggcagaggaggcgcgatcgcaaatgaggtgaccaccctggaaaacgacgccgccttcatcgagaacgagaacgcctacctggaaaaagagatcgccagactgagaaaggaaaaggccgctctgcggaacagactggcccacaagaagggcaagcctattcccaaccccctgctgggcctggatagcaccggagcaccaggaagtgctggttctgctgctggtagtggagcgtgcccggtgccgctgcagctgccgccgctggaacgcctgaccctggatgacaaaaaaccgctgaataccctgatctctgctactggtctgtggatgagtcgtaccggaaccattcataaaatcaaacaccacgaggttagccgttcgaaaatctatattgagatggcgtgtggcgatcatctggttgtgaacaatagccgctcttctcgtacagcacgtgcactgcgtcaccacaaatatcgtaaaacctgtaaacgttgccgtgtgtccgatgaggatctgaacaaattcctgacaaaagccaatgaggaccaaacaagcgtgaaagtgaaagtcgttagcgctcctacccgtactaaaaaagcaatgccgaaatccgttgctcgtgcccctaaaccactggaaaacactgaagcagcacaggcacagccgtctggaagcaaattctctccggccattcctgtttctacccaggagtccgtttctgttccagcaagtgtgagcaccagcattagcagtattagcaccggtgccaccgctagcgccctggttaaaggcaataccaatccgattacaagcatgtctgccccggttcaagcatcagctccagcactgacaaaatcccaaaccgatcgtctggaggttctgctgaatccgaaagacgaaatcagcctgaattccggcaaaccgtttcgtgaactggagagcgaactgctgtcacgtcgtaaaaaagacctgcaacaaatctatgccgaagaacgtgagaactatctggggaaactggaacgtgaaatcacccgctttttcgtggatcgtggctttctggagatcaaatccccgattctgattcctctggagtatatcgagcgtatgggcatcgacaatgataccgaactgagcaaacaaattttccgtgtggataaaaacttctgtctgcgccctatgctagcaccaaatctggctaactatctgcgcaaactggaccgtgccctgcctgatcctatcaaaatcttcgagatcggcccgtgttatcgtaaagagtccgacggtaaagaacatctggaggagtttaccatgctggcctttgcccaaatgggttcaggttgtactcgtgagaacctggaaagcatcatcaccgattttctgaaccacctgggcattgacttcaaaattgtgggcgacagctgtatggtgtttggcgacaccctggatgtcatgcacggcgacctggaactgtctagtgccgttgtgggcccaatcccgctggatcgtgagtggggtatcgacaaaccttggatcggtgcgggttttggtctggagcgtctgctgaaagtaaaacacgacttcaagaacatcaaacgtgctgcacgttccgagtcctattacaatggtatttctactaacctgtaa

SEQ ID NO: 556 - protein, 1090 aa, Artificial Sequence
  Description of Artificial Sequence: Synthetic polypeptide
  TOM20::FUS::SYNZIP3::PylRS(AAAF)
MVGRNSAIAAGVCGALFIGYCIYFDRKRRSDPNFKNRLRERRKKQKLAKERAGLSKLPDLKDAEAVQKFFMASNDYTQQATQSYGAYPTQPGQGYSQQSSQPYGQQSYSGYSQSTDTSGYGQSSYSSYGQSQNTGYGTQSTPQGYGSTGGYGSSQSSQSSYGQQSSYPGYGQQPAPSSTSGSYGSSSQSSSYGQPQSGSYSQQPSYGGQQQSYGQQQSYNPPQGYGQQNQYNSSSGGGGGGGGGGNYGQDQSSMSSGGGSGGGYGNQDQSGGGGSGGYGQQDRGGRGRGGSGGGGGGGGGGYNRSSGGYEPRGRGGGRGGRGGMGGSDRGGFNKFGGPRDQGSRHDSEQDNSDNNTIFVQGLGENVTIESVADYFKQIGIIKTNKKTGQPMINLYTDRETGKLKGEATVSFDDPPSAKAAIDWFDGKEFSGNPIKVSFATRRADFNRGGGNGRGGRGRGGPMGRGGYGGGGSGGGGRGGFPSGGGGGGGQQRAGDWKCPNPTCENMNFSWRNECNQCKAPKPDGPGGGPGGSHMGGNYGDDRRGGRGGAIANEVTTLENDAAFIENENAYLEKEIARLRKEKAALRNRLAHKKGKPIPNPLLGLDSTGAPGSAGSAAGSGACPVPLQLPPLERLTLDDKKPLNTLISATGLWMSRTGTIHKIKHHEVSRSKIYIEMACGDHLVVNNSRSSRTARALRHHKYRKTCKRCRVSDEDLNKFLTKANEDQTSVKVKVVSAPTRTKKAMPKSVARAPKPLENTEAAQAQPSGSKFSPAIPVSTQESVSVPASVSTSISSISTGATASALVKGNTNPITSMSAPVQASAPALTKSQTDRLEVLLNPKDEISLNSGKPFRELESELLSRRKKDLQQIYAEERENYLGKLEREITRFFVDRGFLEIKSPILIPLEYIERMGIDNDTELSKQIFRVDKNFCLRPMLAPNLANYLRKLDRALPDPIKIFEIGPCYRKESDGKEHLEEFTMLAFAQMGSGCTRENLESIITDFLNHLGIDFKIVGDSCMVFGDTLDVMHGDLELSSAVVGPIPLDREWGIDKPWIGAGFGLERLLKVKHDFKNIKRAARSESYYNGISTNL

SEQ ID NO: 557 - DNA, 3093 bp, Artificial Sequence
  Description of Artificial Sequence: Synthetic polynucleotide
  LCK::FUS::SYNZIP3::PylRS(AF)
atgggctgcgtgtgcagcagcaaccccgagggtaccgagctcatggcctcaaacgattatacccaacaagcaacccaaagctatggggcctaccccacccagcccgggcagggctattcccagcagagcagtcagccctacggacagcagagttacagtggttatagccagtccacggacacttcaggatatggccagagcagctattcttcttatggccagagccagaacacaggctatggaactcagtcaactccccagggatatggctcgactggcggctatggcagtagccagagctcccaatcgtcttacgggcagcagtcctcctaccctggctatggccagcagccagctcccagcagcacctcgggaagttacggtagcagttctcagagcagcagctatgggcagccccagagtgggagctacagccagcagcctagctatggtggacagcagcaaagctatggacagcagcaaagctataatccccctcagggctatggacagcagaaccagtacaacagcagcagtggtggtggaggtggaggtggaggtggaggtaactatggccaagatcaatcctccatgagtagtggtggtggcagtggtggcggttatggcaatcaagaccagagtggtggaggtggcagcggtggctatggacagcaggaccgtggaggccgcggcaggggtggcagtggtggcggcggcggcggcggcggtggtggttacaaccgcagcagtggtggctatgaacccagaggtcgtggaggtggccgtggaggcagaggtggcatgggcggaagtgaccgtggtggcttcaataaatttggtggccctcgggaccaaggatcacgtcatgactccgaacaggataattcagacaacaacaccatctttgtgcaaggcctgggtgagaatgttacaattgagtctgtggctgattacttcaagcagattggtattattaagacaaacaagaaaacgggacagcccatgattaatttgtacacagacagggaaactggcaagctgaagggagaggcaacggtctcttttgatgacccaccttcagctaaagcagctattgactggtttgatggtaaagaattctccggaaatcctatcaaggtctcatttgctactcgccgggcagactttaatcggggtggtggcaatggtcgtggaggccgagggcgaggaggacccatgggccgtggaggctatggaggtggtggcagtggtggtggtggccgaggaggatttcccagtggaggtggtggcggtggaggacagcagcgagctggtgactggaagtgtcctaatcccacctgtgagaatatgaacttctcttggaggaatgaatgcaaccagtgtaaggcccctaaaccagatggcccaggagggggaccaggtggctctcacatggggggtaactacggggatgatcgtcgtggtggcagaggtggtgcgatcgcaaatgaggtgaccaccctggaaaacgacgccgccttcatcgagaacgagaacgcctacctggaaaaagagatcgccagactgagaaaggaaaaggccgctctgcggaacagactggcccacaagaagggcgccgattacaaggacgatgatgacaagggagcaccaggaagtgctggttctgctgctggtagtggagcgtgcccggtgccgctgcagctgccgccgctggaacgcctgaccctggatgataaaaaaccgctgaataccctgatctctgctactggtctgtggatgagtcgtaccggaaccattcataaaatcaaacaccacgaggttagccgttcgaaaatctatattgagatggcgtgtggcgatcatctggttgtgaacaatagccgctcttctcgtacagcacgtgcactgcgtcaccacaaatatcgtaaaacctgtaaacgttgccgtgtgtccgatgaggatctgaacaaattcctgacaaaagccaatgaggaccaaacaagcgtgaaagtgaaagtcgttagcgctcctacccgtactaaaaaagcaatgccgaaatccgttgctcgtgcccctaaaccactggaaaacactgaagcagcacaggcacagccgtctggaagcaaattctctccggccattcctgtttctacccaggagtccgtttctgttccagcaagtgtgagcaccagcattagcagtattagcaccggtgccaccgctagcgccctggttaaaggcaataccaatccgattacaagcatgtctgccccggttcaagcatcagctccagcactgacaaaatcccaaaccgatcgtctggaggttctgctgaatccgaaagacgaaatcagcctgaattccggcaaaccgtttcgtgaactggagagcgaactgctgtcacgtcgtaaaaaagacctgcaacaaatctatgccgaagaacgtgagaactatctggggaaactggaacgtgaaatcacccgctttttcgtggatcgtggctttctggagatcaaatccccgattctgattcctctggagtatatcgagcgtatgggcatcgacaatgataccgaactgagcaaacaaattttccgtgtggataaaaacttctgtctgcgccctatgctagcaccaaatctggctaactatctgcgcaaactggaccgtgccctgcctgatcctatcaaaatcttcgagatcggcccgtgttatcgtaaagagtccgacggtaaagaacatctggaggagtttaccatgctgaacttttgccaaatgggttcaggttgtactcgtgagaacctggaaagcatcatcaccgattttctgaaccacctgggcattgacttcaaaattgtgggcgacagctgtatggtgtttggcgacaccctggatgtcatgcacggcgacctggaactgtctagtgccgttgtgggcccaatcccgctggatcgtgagtggggtatcgacaaaccttggatcggtgcgggttttggtctggagcgtctgctgaaagtaaaacacgacttcaagaacatcaaacgtgctgcacgttccgagtcctattacaatggtatttctactaacctgtaa

SEQ ID NO: 558 - protein, 1030 aa, Artificial Sequence
  Description of Artificial Sequence: Synthetic polypeptide
  LCK::FUS::SYNZIP3::PylRS(AF)
MGCVCSSNPEGTELMASNDYTQQATQSYGAYPTQPGQGYSQQSSQPYGQQSYSGYSQSTDTSGYGQSSYSSYGQSQNTGYGTQSTPQGYGSTGGYGSSQSSQSSYGQQSSYPGYGQQPAPSSTSGSYGSSSQSSSYGQPQSGSYSQQPSYGGQQQSYGQQQSYNPPQGYGQQNQYNSSSGGGGGGGGGGNYGQDQSSMSSGGGSGGGYGNQDQSGGGGSGGYGQQDRGGRGRGGSGGGGGGGGGGYNRSSGGYEPRGRGGGRGGRGGMGGSDRGGFNKFGGPRDQGSRHDSEQDNSDNNTIFVQGLGENVTIESVADYFKQIGIIKTNKKTGQPMINLYTDRETGKLKGEATVSFDDPPSAKAAIDWFDGKEFSGNPIKVSFATRRADFNRGGGNGRGGRGRGGPMGRGGYGGGGSGGGGRGGFPSGGGGGGGQQRAGDWKCPNPTCENMNFSWRNECNQCKAPKPDGPGGGPGGSHMGGNYGDDRRGGRGGAIANEVTTLENDAAFIENENAYLEKEIARLRKEKAALRNRLAHKKGADYKDDDDKGAPGSAGSAAGSGACPVPLQLPPLERLTLDDKKPLNTLISATGLWMSRTGTIHKIKHHEVSRSKIYIEMACGDHLVVNNSRSSRTARALRHHKYRKTCKRCRVSDEDLNKFLTKANEDQTSVKVKVVSAPTRTKKAMPKSVARAPKPLENTEAAQAQPSGSKFSPAIPVSTQESVSVPASVSTSISSISTGATASALVKGNTNPITSMSAPVQASAPALTKSQTDRLEVLLNPKDEISLNSGKPFRELESELLSRRKKDLQQIYAEERENYLGKLEREITRFFVDRGFLEIKSPILIPLEYIERMGIDNDTELSKQIFRVDKNFCLRPMLAPNLANYLRKLDRALPDPIKIFEIGPCYRKESDGKEHLEEFTMLNFCQMGSGCTRENLESIITDFLNHLGIDFKIVGDSCMVFGDTLDVMHGDLELSSAVVGPIPLDREWGIDKPWIGAGFGLERLLKVKHDFKNIKRAARSESYYNGISTNL

SEQ ID NO: 559 - DNA, 1686 bp, Artificial Sequence
  Description of Artificial Sequence: Synthetic polynucleotide
  LCK::SYNZIP1::PylRS(AF)
atgggctgcgtgtgcagcagcaaccccgagggtaccgagctcgcgatcgcaaatctggtggcccagctggaaaacgaggtggccagcctggaaaacgagaacgaaaccctgaagaaaaagaacctgcacaagaaggacctgatcgcctacctggaaaaggaaatcgccaacctgagaaagaagatcgaggaaggcaagcctattcccaaccccctgctgggcctggatagcaccggagcaccaggaagtgctggttctgctgctggtagtggagcgtgcccggtgccgctgcagctgccgccgctggaacgcctgaccctggatgacaaaaaaccgctgaataccctgatctctgctactggtctgtggatgagtcgtaccggaaccattcataaaatcaaacaccacgaggttagccgttcgaaaatctatattgagatggcgtgtggcgatcatctggttgtgaacaatagccgctcttctcgtacagcacgtgcactgcgtcaccacaaatatcgtaaaacctgtaaacgttgccgtgtgtccgatgaggatctgaacaaattcctgacaaaagccaatgaggaccaaacaagcgtgaaagtgaaagtcgttagcgctcctacccgtactaaaaaagcaatgccgaaatccgttgctcgtgcccctaaaccactggaaaacactgaagcagcacaggcacagccgtctggaagcaaattctctccggccattcctgtttctacccaggagtccgtttctgttccagcaagtgtgagcaccagcattagcagtattagcaccggtgccaccgctagcgccctggttaaaggcaataccaatccgattacaagcatgtctgccccggttcaagcatcagctccagcactgacaaaatcccaaaccgatcgtctggaggttctgctgaatccgaaagacgaaatcagcctgaattccggcaaaccgtttcgtgaactggagagcgaactgctgtcacgtcgtaaaaaagacctgcaacaaatctatgccgaagaacgtgagaactatctggggaaactggaacgtgaaatcacccgctttttcgtggatcgtggctttctggagatcaaatccccgattctgattcctctggagtatatcgagcgtatgggcatcgacaatgataccgaactgagcaaacaaattttccgtgtggataaaaacttctgtctgcgccctatgctagcaccaaatctggctaactatctgcgcaaactggaccgtgccctgcctgatcctatcaaaatcttcgagatcggcccgtgttatcgtaaagagtccgacggtaaagaacatctggaggagtttaccatgctgaacttttgccaaatgggttcaggttgtactcgtgagaacctggaaagcatcatcaccgattttctgaaccacctgggcattgacttcaaaattgtgggcgacagctgtatggtgtttggcgacaccctggatgtcatgcacggcgacctggaactgtctagtgccgttgtgggcccaatcccgctggatcgtgagtggggtatcgacaaaccttggatcggtgcgggttttggtctggagcgtctgctgaaagtaaaacacgacttcaagaacatcaaacgtgctgcacgttccgagtcctattacaatggtatttctactaacctgtaa

SEQ ID NO: 560 - protein, 561 aa, Artificial Sequence
  Description of Artificial Sequence: Synthetic polypeptide
  LCK::SYNZIP1::PylRS(AF)
MGCVCSSNPEGTELAIANLVAQLENEVASLENENETLKKKNLHKKDLIAYLEKEIANLRKKIEEGKPIPNPLLGLDSTGAPGSAGSAAGSGACPVPLQLPPLERLTLDDKKPLNTLISATGLWMSRTGTIHKIKHHEVSRSKIYIEMACGDHLVVNNSRSSRTARALRHHKYRKTCKRCRVSDEDLNKFLTKANEDQTSVKVKVVSAPTRTKKAMPKSVARAPKPLENTEAAQAQPSGSKFSPAIPVSTQESVSVPASVSTSISSISTGATASALVKGNTNPITSMSAPVQASAPALTKSQTDRLEVLLNPKDEISLNSGKPFRELESELLSRRKKDLQQIYAEERENYLGKLEREITRFFVDRGFLEIKSPILIPLEYIERMGIDNDTELSKQIFRVDKNFCLRPMLAPNLANYLRKLDRALPDPIKIFEIGPCYRKESDGKEHLEEFTMLNFCQMGSGCTRENLESIITDFLNHLGIDFKIVGDSCMVFGDTLDVMHGDLELSSAVVGPIPLDREWGIDKPWIGAGFGLERLLKVKHDFKNIKRAARSESYYNGISTNL

SEQ ID NO: 561 - DNA, 1671 bp, Artificial Sequence
  Description of Artificial Sequence: Synthetic polynucleotide
  LCK::SYNZIP3::PylRS(AF)
atgggctgcgtgtgcagcagcaaccccgagggtaccgagctcgcgatcgcaaatgaggtgaccaccctggaaaacgacgccgccttcatcgagaacgagaacgcctacctggaaaaagagatcgccagactgagaaaggaaaaggccgctctgcggaacagactggcccacaagaagggcaagcctattcccaaccccctgctgggcctggatagcaccggagcaccaggaagtgctggttctgctgctggtagtggagcgtgcccggtgccgctgcagctgccgccgctggaacgcctgaccctggatgacaaaaaaccgctgaataccctgatctctgctactggtctgtggatgagtcgtaccggaaccattcataaaatcaaacaccacgaggttagccgttcgaaaatctatattgagatggcgtgtggcgatcatctggttgtgaacaatagccgctcttctcgtacagcacgtgcactgcgtcaccacaaatatcgtaaaacctgtaaacgttgccgtgtgtccgatgaggatctgaacaaattcctgacaaaagccaatgaggaccaaacaagcgtgaaagtgaaagtcgttagcgctcctacccgtactaaaaaagcaatgccgaaatccgttgctcgtgcccctaaaccactggaaaacactgaagcagcacaggcacagccgtctggaagcaaattctctccggccattcctgtttctacccaggagtccgtttctgttccagcaagtgtgagcaccagcattagcagtattagcaccggtgccaccgctagcgccctggttaaaggcaataccaatccgattacaagcatgtctgccccggttcaagcatcagctccagcactgacaaaatcccaaaccgatcgtctggaggttctgctgaatccgaaagacgaaatcagcctgaattccggcaaaccgtttcgtgaactggagagcgaactgctgtcacgtcgtaaaaaagacctgcaacaaatctatgccgaagaacgtgagaactatctggggaaactggaacgtgaaatcacccgctttttcgtggatcgtggctttctggagatcaaatccccgattctgattcctctggagtatatcgagcgtatgggcatcgacaatgataccgaactgagcaaacaaattttccgtgtggataaaaacttctgtctgcgccctatgctagcaccaaatctggctaactatctgcgcaaactggaccgtgccctgcctgatcctatcaaaatcttcgagatcggcccgtgttatcgtaaagagtccgacggtaaagaacatctggaggagtttaccatgctgaacttttgccaaatgggttcaggttgtactcgtgagaacctggaaagcatcatcaccgattttctgaaccacctgggcattgacttcaaaattgtgggcgacagctgtatggtgtttggcgacaccctggatgtcatgcacggcgacctggaactgtctagtgccgttgtgggcccaatcccgctggatcgtgagtggggtatcgacaaaccttggatcggtgcgggttttggtctggagcgtctgctgaaagtaaaacacgacttcaagaacatcaaacgtgctgcacgttccgagtcctattacaatggtatttctactaacctgtaa

SEQ ID NO: 562 - protein, 556 aa, Artificial Sequence
  Description of Artificial Sequence: Synthetic polypeptide
  LCK::SYNZIP3::PylRS(AF)
MGCVCSSNPEGTELAIANEVTTLENDAAFIENENAYLEKEIARLRKEKAALRNRLAHKKGKPIPNPLLGLDSTGAPGSAGSAAGSGACPVPLQLPPLERLTLDDKKPLNTLISATGLWMSRTGTIHKIKHHEVSRSKIYIEMACGDHLVVNNSRSSRTARALRHHKYRKTCKRCRVSDEDLNKFLTKANEDQTSVKVKVVSAPTRTKKAMPKSVARAPKPLENTEAAQAQPSGSKFSPAIPVSTQESVSVPASVSTSISSISTGATASALVKGNTNPITSMSAPVQASAPALTKSQTDRLEVLLNPKDEISLNSGKPFRELESELLSRRKKDLQQIYAEERENYLGKLEREITRFFVDRGFLEIKSPILIPLEYIERMGIDNDTELSKQIFRVDKNFCLRPMLAPNLANYLRKLDRALPDPIKIFEIGPCYRKESDGKEHLEEFTMLNFCQMGSGCTRENLESIITDFLNHLGIDFKIVGDSCMVFGDTLDVMHGDLELSSAVVGPIPLDREWGIDKPWIGAGFGLERLLKVKHDFKNIKRAARSESYYNGISTNL

SEQ ID NO: 563 - DNA, 579 bp, Artificial Sequence
  Description of Artificial Sequence: Synthetic polynucleotide
  SYNZIP2::MCP
atggcgatcgcagctagaaacgcctacctgagaaagaaaatcgccagactgaagaaggacaacctgcagctggaaagagacgagcagaacctggaaaagatcatcgccaacctcagagatgagatcgccagactggaaaacgaggtggccagccacgagcagtatccctatgatgtgccggattatgctggagcaccaggaagtgctggttctgctgctggtagtggagcttctaactttactcagttcgttctcgtcgacaatggcggaactggcgacgtgactgtcgccccaagcaacttcgctaacgggatcgctgaatggatcagctctaactcgcgttcacaggcttacaaagtaacctgtagcgttcgtcagagctctgcgcagaatcgcaaatacaccatcaaagtcgaggtgcctaaaggcgcctggcgttcgtacttaaatatggaactaaccattccaattttcgccacgaattccgactgcgagcttattgttaaggcaatgcaaggtctcctaaaagatggaaacccgattccctcagcaatcgcagcaaactccggcatctactaa

SEQ ID NO: 564 - protein, 192 aa, Artificial Sequence
  Description of Artificial Sequence: Synthetic polypeptide
  SYNZIP2::MCP
MAIAARNAYLRKKIARLKKDNLQLERDEQNLEKIIANLRDEIARLENEVASHEQYPYDVPDYAGAPGSAGSAAGSGASNFTQFVLVDNGGTGDVTVAPSNFANGIAEWISSNSRSQAYKVTCSVRQSSAQNRKYTIKVEVPKGAWRSYLNMELTIPIFATNSDCELIVKAMQGLLKDGNPIPSAIAANSGIY

SEQ ID NO: 565 - DNA, 2502 bp, Artificial Sequence
  Description of Artificial Sequence: Synthetic polynucleotide
  LCK::EWSR1::SYNZIP2::MCP
atgggctgcgtgtgcagcagcaaccccgagggtaccgagctcatggcgtccacggattacagtacctatagccaagctgcagcgcagcagggctacagtgcttacaccgcccagcccactcaaggatatgcacagaccacccaggcatatgggcaacaaagctatggaacctatggacagcccactgatgtcagctatacccaggctcagaccactgcaacctatgggcagaccgcctatgcaacttcttatggacagcctcccactggttatactactccaactgccccccaggcatacagccagcctgtccaggggtatggcactggtgcttatgataccaccactgctacagtcaccaccacccaggcctcctatgcagctcagtctgcatatggcactcagcctgcttatccagcctatgggcagcagccagcagccactgcacctacaagaccgcaggatggaaacaagcccactgagactagtcaacctcaatctagcacagggggttacaaccagcccagcctaggatatggacagagtaactacagttatccccaggtacctgggagctaccccatgcagccagtcactgcacctccatcctaccctcctaccagctattcctctacacagccgactagttatgatcagagcagttactctcagcagaacacctatgggcaaccgagcagctatggacagcagagtagctatggtcaacaaagcagctatgggcagcagcctcccactagttacccaccccaaactggatcctacagccaagctccaagtcaatatagccaacagagcagcagctacgggcagcagagttcattccgacaggaccaccccagtagcatgggtgtttatgggcaggagtctggaggattttccggaccaggagagaaccggagcatgagtggccctgataaccggggcaggggaagagggggatttgatcgtggaggcatgagcagaggtgggcggggaggaggacgcggtggaatgggcagcgctggagagcgaggtggcttcaataagcctggtggacccatggatgaaggaccagatcttgatctaggcccacctgtagatccagatgaagactctgacaacagtgcaatttatgtacaaggattaaatgacagtgtgactctagatgatctggcagacttctttaagcagtgtggggttgttaagatgaacaagagaactgggcaacccatgatccacatctacctggacaaggaaacaggaaagcccaaaggcgatgccacagtgtcctatgaagacccacctactgccaaggctgccgtggaatggtttgatgggaaagattttcaagggagcaaacttaaagtctcccttgctcggaagaagcctccaatgaacagtatgcggggtggtctgccaccccgtgagggcagaggcatgccaccaccactccgtggaggtccaggaggcccaggaggtcctgggggacccatgggtcgcatgggaggccgtggaggagatagaggaggcttccctccaagaggaccccggggttcccgagggaacccctctggaggaggaaacgtccagcaccgagctggagactggcagtgtcccaatccgggttgtggaaaccagaacttcgcctggagaacagagtgcaaccagtgtaaggccccaaagcctgaaggcttcctcccgccaccctttccgcccccgggtggtgatcgtggcagaggtggccctggtggcatgcggggaggaagaggtggcctcatggatcgtggtggtcccggtggaatgttcagaggtggccgtggtggagacagaggtggcttccgtggtggccggggcatggaccgaggtggctttggtggaggaagacgaggtggccctggggggccccctggacctttgatggaacaggcgatcgcagctagaaacgcctacctgagaaagaaaatcgccagactgaagaaggacaacctgcagctggaaagagacgagcagaacctggaaaagatcatcgccaacctcagagatgagatcgccagactggaaaacgaggtggccagccacgagcagtatccctatgatgtgccggattatgctggagcaccaggaagtgctggttctgctgctggtagtggagcttctaactttactcagttcgttctcgtcgacaatggcggaactggcgacgtgactgtcgccccaagcaacttcgctaacgggatcgctgaatggatcagctctaactcgcgttcacaggcttacaaagtaacctgtagcgttcgtcagagctctgcgcagaatcgcaaatacaccatcaaagtcgaggtgcctaaaggcgcctggcgttcgtacttaaatatggaactaaccattccaattttcgccacgaattccgactgcgagcttattgttaaggcaatgcaaggtctcctaaaagatggaaacccgattccctcagcaatcgcagcaaactccggcatctactaa

SEQ ID NO: 566 - protein, 833 aa, Artificial Sequence
  Description of Artificial Sequence: Synthetic polypeptide
  LCK::EWSR1::SYNZIP2::MCP
MGCVCSSNPEGTELMASTDYSTYSQAAAQQGYSAYTAQPTQGYAQTTQAYGQQSYGTYGQPTDVSYTQAQTTATYGQTAYATSYGQPPTGYTTPTAPQAYSQPVQGYGTGAYDTTTATVTTTQASYAAQSAYGTQPAYPAYGQQPAATAPTRPQDGNKPTETSQPQSSTGGYNQPSLGYGQSNYSYPQVPGSYPMQPVTAPPSYPPTSYSSTQPTSYDQSSYSQQNTYGQPSSYGQQSSYGQQSSYGQQPPTSYPPQTGSYSQAPSQYSQQSSSYGQQSSFRQDHPSSMGVYGQESGGFSGPGENRSMSGPDNRGRGRGGFDRGGMSRGGRGGGRGGMGSAGERGGFNKPGGPMDEGPDLDLGPPVDPDEDSDNSAIYVQGLNDSVTLDDLADFFKQCGVVKMNKRTGQPMIHIYLDKETGKPKGDATVSYEDPPTAKAAVEWFDGKDFQGSKLKVSLARKKPPMNSMRGGLPPREGRGMPPPLRGGPGGPGGPGGPMGRMGGRGGDRGGFPPRGPRGSRGNPSGGGNVQHRAGDWQCPNPGCGNQNFAWRTECNQCKAPKPEGFLPPPFPPPGGDRGRGGPGGMRGGRGGLMDRGGPGGMFRGGRGGDRGGFRGGRGMDRGGFGGGRRGGPGGPPGPLMEQAIAARNAYLRKKIARLKKDNLQLERDEQNLEKIIANLRDEIARLENEVASHEQYPYDVPDYAGAPGSAGSAAGSGASNFTQFVLVDNGGTGDVTVAPSNFANGIAEWISSNSRSQAYKVTCSVRQSSAQNRKYTIKVEVPKGAWRSYLNMELTIPIFATNSDCELIVKAMQGLLKDGNPIPSAIAANSGIY

SEQ ID NO: 567 - DNA, 2658 bp, Artificial Sequence
  Description of Artificial Sequence: Synthetic polynucleotide
  LCK::EWSR1::SYNZIP4::4xlambdaN22
atgggctgcgtgtgcagcagcaaccccgagggtaccgagctcatggcgtccacggattacagtacctatagccaagctgcagcgcagcagggctacagtgcttacaccgcccagcccactcaaggatatgcacagaccacccaggcatatgggcaacaaagctatggaacctatggacagcccactgatgtcagctatacccaggctcagaccactgcaacctatgggcagaccgcctatgcaacttcttatggacagcctcccactggttatactactccaactgccccccaggcatacagccagcctgtccaggggtatggcactggtgcttatgataccaccactgctacagtcaccaccacccaggcctcctatgcagctcagtctgcatatggcactcagcctgcttatccagcctatgggcagcagccagcagccactgcacctacaagaccgcaggatggaaacaagcccactgagactagtcaacctcaatctagcacagggggttacaaccagcccagcctaggatatggacagagtaactacagttatccccaggtacctgggagctaccccatgcagccagtcactgcacctccatcctaccctcctaccagctattcctctacacagccgactagttatgatcagagcagttactctcagcagaacacctatgggcaaccgagcagctatggacagcagagtagctatggtcaacaaagcagctatgggcagcagcctcccactagttacccaccccaaactggatcctacagccaagctccaagtcaatatagccaacagagcagcagctacgggcagcagagttcattccgacaggaccaccccagtagcatgggtgtttatgggcaggagtctggaggattttccggaccaggagagaaccggagcatgagtggccctgataaccggggcaggggaagagggggatttgatcgtggaggcatgagcagaggtgggcggggaggaggacgcggtggaatgggcagcgctggagagcgaggtggcttcaataagcctggtggacccatggatgaaggaccagatcttgatctaggcccacctgtagatccagatgaagactctgacaacagtgcaatttatgtacaaggattaaatgacagtgtgactctagatgatctggcagacttctttaagcagtgtggggttgttaagatgaacaagagaactgggcaacccatgatccacatctacctggacaaggaaacaggaaagcccaaaggcgatgccacagtgtcctatgaagacccacctactgccaaggctgccgtggaatggtttgatgggaaagattttcaagggagcaaacttaaagtctcccttgctcggaagaagcctccaatgaacagtatgcggggtggtctgccaccccgtgagggcagaggcatgccaccaccactccgtggaggtccaggaggcccaggaggtcctgggggacccatgggtcgcatgggaggccgtggaggagatagaggaggcttccctccaagaggaccccggggttcccgagggaacccctctggaggaggaaacgtccagcaccgagctggagactggcagtgtcccaatccgggttgtggaaaccagaacttcgcctggagaacagagtgcaaccagtgtaaggccccaaagcctgaaggcttcctcccgccaccctttccgcccccgggtggtgatcgtggcagaggtggccctggtggcatgcggggaggaagaggtggcctcatggatcgtggtggtcccggtggaatgttcagaggtggccgtggtggagacagaggtggcttccgtggtggccggggcatggaccgaggtggctttggtggaggaagacgaggtggccctggggggccccctggacctttgatggaacaggcgatcgcacaaaaggtggctgaactgaaaaatagagtggccgtgaagctgaaccggaacgagcagctgaagaacaaggtggaagagctgaagaacagaaacgcctacctgaagaatgagctggccaccctggaaaacgaggtggccagactggaaaacgacgtggccgagggagcaccaggaagtgctggttctgctgctggtagtggagagcagaagctgatctcagaggaggacctgctagccaccatggacgcacaaacacgacgacgtgagcgtcgcgctgagaaacaagctcaatggaaagctgcaaacccaccgctcgacggagccggagctggcgctggagctggagccggagctggcggtctagccaccatggacgcacaaacacgacgacgtgagcgtcgcgctgagaaacaagctcaatggaaagctgcaaacccaccgctcgacggagccggagctggcgctggagctggagccggagctggcggtctagccaccatggacgcacaaacacgacgacgtgagcgtcgcgctgagaaacaagctcaatggaaagctgcaaacccaccgctcgacggagccggagctggcgctggagctggagccggagctggcggtctagccaccatggacgcacaaacacgacgacgtgagcgtcgcgctgagaaacaagctcaatggaaagctgcaaacccaccgctcgagtctagagggcccgtttaa

SEQ ID NO: 568 - protein, 885 aa, Artificial Sequence
  Description of Artificial Sequence: Synthetic polypeptide
  LCK::EWSR1::SYNZIP4::4xlambdaN22
MGCVCSSNPEGTELMASTDYSTYSQAAAQQGYSAYTAQPTQGYAQTTQAYGQQSYGTYGQPTDVSYTQAQTTATYGQTAYATSYGQPPTGYTTPTAPQAYSQPVQGYGTGAYDTTTATVTTTQASYAAQSAYGTQPAYPAYGQQPAATAPTRPQDGNKPTETSQPQSSTGGYNQPSLGYGQSNYSYPQVPGSYPMQPVTAPPSYPPTSYSSTQPTSYDQSSYSQQNTYGQPSSYGQQSSYGQQSSYGQQPPTSYPPQTGSYSQAPSQYSQQSSSYGQQSSFRQDHPSSMGVYGQESGGFSGPGENRSMSGPDNRGRGRGGFDRGGMSRGGRGGGRGGMGSAGERGGFNKPGGPMDEGPDLDLGPPVDPDEDSDNSAIYVQGLNDSVTLDDLADFFKQCGVVKMNKRTGQPMIHIYLDKETGKPKGDATVSYEDPPTAKAAVEWFDGKDFQGSKLKVSLARKKPPMNSMRGGLPPREGRGMPPPLRGGPGGPGGPGGPMGRMGGRGGDRGGFPPRGPRGSRGNPSGGGNVQHRAGDWQCPNPGCGNQNFAWRTECNQCKAPKPEGFLPPPFPPPGGDRGRGGPGGMRGGRGGLMDRGGPGGMFRGGRGGDRGGFRGGRGMDRGGFGGGRRGGPGGPPGPLMEQAIAQKVAELKNRVAVKLNRNEQLKNKVEELKNRNAYLKNELATLENEVARLENDVAEGAPGSAGSAAGSGEQKLISEEDLLATMDAQTRRRERRAEKQAQWKAANPPLDGAGAGAGAGAGAGGLATMDAQTRRRERRAEKQAQWKAANPPLDGAGAGAGAGAGAGGLATMDAQTRRRERRAEKQAQWKAANPPLDGAGAGAGAGAGAGGLATMDAQTRRRERRAEKQAQWKAANPPLESRGPV

SEQ ID NO: 569 - DNA, 618 bp, Artificial Sequence
  Description of Artificial Sequence: Synthetic polynucleotide
  LCK::SYNZIP2::MCP
atgggctgcgtgtgcagcagcaaccccgagggtaccgagctcgcgatcgcagctagaaacgcctacctgagaaagaaaatcgccagactgaagaaggacaacctgcagctggaaagagacgagcagaacctggaaaagatcatcgccaacctcagagatgagatcgccagactggaaaacgaggtggccagccacgagcagtatccctatgatgtgccggattatgctggagcaccaggaagtgctggttctgctgctggtagtggagcttctaactttactcagttcgttctcgtcgacaatggcggaactggcgacgtgactgtcgccccaagcaacttcgctaacgggatcgctgaatggatcagctctaactcgcgttcacaggcttacaaagtaacctgtagcgttcgtcagagctctgcgcagaatcgcaaatacaccatcaaagtcgaggtgcctaaaggcgcctggcgttcgtacttaaatatggaactaaccattccaattttcgccacgaattccgactgcgagcttattgttaaggcaatgcaaggtctcctaaaagatggaaacccgattccctcagcaatcgcagcaaactccggcatctactaa

SEQ ID NO: 570 - protein, 205 aa, Artificial Sequence
  Description of Artificial Sequence: Synthetic polypeptide
  LCK::SYNZIP2::MCP
MGCVCSSNPEGTELAIAARNAYLRKKIARLKKDNLQLERDEQNLEKIIANLRDEIARLENEVASHEQYPYDVPDYAGAPGSAGSAAGSGASNFTQFVLVDNGGTGDVTVAPSNFANGIAEWISSNSRSQAYKVTCSVRQSSAQNRKYTIKVEVPKGAWRSYLNMELTIPIFATNSDCELIVKAMQGLLKDGNPIPSAIAANSGIY

SEQ ID NO: 571 - DNA, 2463 bp, Artificial Sequence
  Description of Artificial Sequence: Synthetic polynucleotide
  EWSR1::SYNZIP2::MCP
atgatggcgtccacggattacagtacctatagccaagctgcagcgcagcagggctacagtgcttacaccgcccagcccactcaaggatatgcacagaccacccaggcatatgggcaacaaagctatggaacctatggacagcccactgatgtcagctatacccaggctcagaccactgcaacctatgggcagaccgcctatgcaacttcttatggacagcctcccactggttatactactccaactgccccccaggcatacagccagcctgtccaggggtatggcactggtgcttatgataccaccactgctacagtcaccaccacccaggcctcctatgcagctcagtctgcatatggcactcagcctgcttatccagcctatgggcagcagccagcagccactgcacctacaagaccgcaggatggaaacaagcccactgagactagtcaacctcaatctagcacagggggttacaaccagcccagcctaggatatggacagagtaactacagttatccccaggtacctgggagctaccccatgcagccagtcactgcacctccatcctaccctcctaccagctattcctctacacagccgactagttatgatcagagcagttactctcagcagaacacctatgggcaaccgagcagctatggacagcagagtagctatggtcaacaaagcagctatgggcagcagcctcccactagttacccaccccaaactggatcctacagccaagctccaagtcaatatagccaacagagcagcagctacgggcagcagagttcattccgacaggaccaccccagtagcatgggtgtttatgggcaggagtctggaggattttccggaccaggagagaaccggagcatgagtggccctgataaccggggcaggggaagagggggatttgatcgtggaggcatgagcagaggtgggcggggaggaggacgcggtggaatgggcagcgctggagagcgaggtggcttcaataagcctggtggacccatggatgaaggaccagatcttgatctaggcccacctgtagatccagatgaagactctgacaacagtgcaatttatgtacaaggattaaatgacagtgtgactctagatgatctggcagacttctttaagcagtgtggggttgttaagatgaacaagagaactgggcaacccatgatccacatctacctggacaaggaaacaggaaagcccaaaggcgatgccacagtgtcctatgaagacccacctactgccaaggctgccgtggaatggtttgatgggaaagattttcaagggagcaaacttaaagtctcccttgctcggaagaagcctccaatgaacagtatgcggggtggtctgccaccccgtgagggcagaggcatgccaccaccactccgtggaggtccaggaggcccaggaggtcctgggggacccatgggtcgcatgggaggccgtggaggagatagaggaggcttccctccaagaggaccccggggttcccgagggaacccctctggaggaggaaacgtccagcaccgagctggagactggcagtgtcccaatccgggttgtggaaaccagaacttcgcctggagaacagagtgcaaccagtgtaaggccccaaagcctgaaggcttcctcccgccaccctttccgcccccgggtggtgatcgtggcagaggtggccctggtggcatgcggggaggaagaggtggcctcatggatcgtggtggtcccggtggaatgttcagaggtggccgtggtggagacagaggtggcttccgtggtggccggggcatggaccgaggtggctttggtggaggaagacgaggtggccctggggggccccctggacctttgatggaacaggcgatcgcagctagaaacgcctacctgagaaagaaaatcgccagactgaagaaggacaacctgcagctggaaagagacgagcagaacctggaaaagatcatcgccaacctcagagatgagatcgccagactggaaaacgaggtggccagccacgagcagtatccctatgatgtgccggattatgctggagcaccaggaagtgctggttctgctgctggtagtggagcttctaactttactcagttcgttctcgtcgacaatggcggaactggcgacgtgactgtcgccccaagcaacttcgctaacgggatcgctgaatggatcagctctaactcgcgttcacaggcttacaaagtaacctgtagcgttcgtcagagctctgcgcagaatcgcaaatacaccatcaaagtcgaggtgcctaaaggcgcctggcgttcgtacttaaatatggaactaaccattccaattttcgccacgaattccgactgcgagcttattgttaaggcaatgcaaggtctcctaaaagatggaaacccgattccctcagcaatcgcagcaaactccggcatctactaa

SEQ ID NO: 572 - protein, 820 aa, Artificial Sequence
  Description of Artificial Sequence: Synthetic polypeptide
  EWSR1::SYNZIP2::MCP
MMASTDYSTYSQAAAQQGYSAYTAQPTQGYAQTTQAYGQQSYGTYGQPTDVSYTQAQTTATYGQTAYATSYGQPPTGYTTPTAPQAYSQPVQGYGTGAYDTTTATVTTTQASYAAQSAYGTQPAYPAYGQQPAATAPTRPQDGNKPTETSQPQSSTGGYNQPSLGYGQSNYSYPQVPGSYPMQPVTAPPSYPPTSYSSTQPTSYDQSSYSQQNTYGQPSSYGQQSSYGQQSSYGQQPPTSYPPQTGSYSQAPSQYSQQSSSYGQQSSFRQDHPSSMGVYGQESGGFSGPGENRSMSGPDNRGRGRGGFDRGGMSRGGRGGGRGGMGSAGERGGFNKPGGPMDEGPDLDLGPPVDPDEDSDNSAIYVQGLNDSVTLDDLADFFKQCGVVKMNKRTGQPMIHIYLDKETGKPKGDATVSYEDPPTAKAAVEWFDGKDFQGSKLKVSLARKKPPMNSMRGGLPPREGRGMPPPLRGGPGGPGGPGGPMGRMGGRGGDRGGFPPRGPRGSRGNPSGGGNVQHRAGDWQCPNPGCGNQNFAWRTECNQCKAPKPEGFLPPPFPPPGGDRGRGGPGGMRGGRGGLMDRGGPGGMFRGGRGGDRGGFRGGRGMDRGGFGGGRRGGPGGPPGPLMEQAIAARNAYLRKKIARLKKDNLQLERDEQNLEKIIANLRDEIARLENEVASHEQYPYDVPDYAGAPGSAGSAAGSGASNFTQFVLVDNGGTGDVTVAPSNFANGIAEWISSNSRSQAYKVTCSVRQSSAQNRKYTIKVEVPKGAWRSYLNMELTIPIFATNSDCELIVKAMQGLLKDGNPIPSAIAANSGIY

SEQ ID NO: 573 - DNA, 3120 bp, Artificial Sequence
  Description of Artificial Sequence: Synthetic polynucleotide
  LCK::FUS::SYNZIP1::PylRS(AF)
atgggctgcgtgtgcagcagcaaccccgagggtaccgagctcatggcctcaaacgattatacccaacaagcaacccaaagctatggggcctaccccacccagcccgggcagggctattcccagcagagcagtcagccctacggacagcagagttacagtggttatagccagtccacggacacttcaggatatggccagagcagctattcttcttatggccagagccagaacacaggctatggaactcagtcaactccccagggatatggctcgactggcggctatggcagtagccagagctcccaatcgtcttacgggcagcagtcctcctaccctggctatggccagcagccagctcccagcagcacctcgggaagttacggtagcagttctcagagcagcagctatgggcagccccagagtgggagctacagccagcagcctagctatggtggacagcagcaaagctatggacagcagcaaagctataatccccctcagggctatggacagcagaaccagtacaacagcagcagtggtggtggaggtggaggtggaggtggaggtaactatggccaagatcaatcctccatgagtagtggtggtggcagtggtggcggttatggcaatcaagaccagagtggtggaggtggcagcggtggctatggacagcaggaccgtggaggccgcggcaggggtggcagtggtggcggcggcggcggcggcggtggtggttacaaccgcagcagtggtggctatgaacccagaggtcgtggaggtggccgtggaggcagaggtggcatgggcggaagtgaccgtggtggcttcaataaatttggtggccctcgggaccaaggatcacgtcatgactccgaacaggataattcagacaacaacaccatctttgtgcaaggcctgggtgagaatgttacaattgagtctgtggctgattacttcaagcagattggtattattaagacaaacaagaaaacgggacagcccatgattaatttgtacacagacagggaaactggcaagctgaagggagaggcaacggtctcttttgatgacccaccttcagctaaagcagctattgactggtttgatggtaaagaattctccggaaatcctatcaaggtctcatttgctactcgccgggcagactttaatcggggtggtggcaatggtcgtggaggccgagggcgaggaggacccatgggccgtggaggctatggaggtggtggcagtggtggtggtggccgaggaggatttcccagtggaggtggtggcggtggaggacagcagcgagctggtgactggaagtgtcctaatcccacctgtgagaatatgaacttctcttggaggaatgaatgcaaccagtgtaaggcccctaaaccagatggcccaggagggggaccaggtggctctcacatggggggtaactacggggatgatcgtcgtggtggcagaggaggcgcgatcgcaaatctggtggcccagctggaaaacgaggtggccagcctggaaaacgagaacgaaaccctgaagaaaaagaacctgcacaagaaggacctgatcgcctacctggaaaaggaaatcgccaacctgagaaagaagatcgaggaaggcaagcctattcccaaccccctgctgggcctggatagcaccggagcaccaggaagtgctggttctgctgctggtagtggagcgtgcccggtgccgctgcagctgccgccgctggaacgcctgaccctggatgacaaaaaaccgctgaataccctgatctctgctactggtctgtggatgagtcgtaccggaaccattcataaaatcaaacaccacgaggttagccgttcgaaaatctatattgagatggcgtgtggcgatcatctggttgtgaacaatagccgctcttctcgtacagcacgtgcactgcgtcaccacaaatatcgtaaaacctgtaaacgttgccgtgtgtccgatgaggatctgaacaaattcctgacaaaagccaatgaggaccaaacaagcgtgaaagtgaaagtcgttagcgctcctacccgtactaaaaaagcaatgccgaaatccgttgctcgtgcccctaaaccactggaaaacactgaagcagcacaggcacagccgtctggaagcaaattctctccggccattcctgtttctacccaggagtccgtttctgttccagcaagtgtgagcaccagcattagcagtattagcaccggtgccaccgctagcgccctggttaaaggcaataccaatccgattacaagcatgtctgccccggttcaagcatcagctccagcactgacaaaatcccaaaccgatcgtctggaggttctgctgaatccgaaagacgaaatcagcctgaattccggcaaaccgtttcgtgaactggagagcgaactgctgtcacgtcgtaaaaaagacctgcaacaaatctatgccgaagaacgtgagaactatctggggaaactggaacgtgaaatcacccgctttttcgtggatcgtggctttctggagatcaaatccccgattctgattcctctggagtatatcgagcgtatgggcatcgacaatgataccgaactgagcaaacaaattttccgtgtggataaaaacttctgtctgcgccctatgctagcaccaaatctggctaactatctgcgcaaactggaccgtgccctgcctgatcctatcaaaatcttcgagatcggcccgtgttatcgtaaagagtccgacggtaaagaacatctggaggagtttaccatgctgaacttttgccaaatgggttcaggttgtactcgtgagaacctggaaagcatcatcaccgattttctgaaccacctgggcattgacttcaaaattgtgggcgacagctgtatggtgtttggcgacaccctggatgtcatgcacggcgacctggaactgtctagtgccgttgtgggcccaatcccgctggatcgtgagtggggtatcgacaaaccttggatcggtgcgggttttggtctggagcgtctgctgaaagtaaaacacgacttcaagaacatcaaacgtgctgcacgttccgagtcctattacaatggtatttctactaacctgtaa

SEQ ID NO: 574 - protein, 1039 aa, Artificial Sequence
  Description of Artificial Sequence: Synthetic polypeptide
  LCK::FUS::SYNZIP1::PylRS(AF)
MGCVCSSNPEGTELMASNDYTQQATQSYGAYPTQPGQGYSQQSSQPYGQQSYSGYSQSTDTSGYGQSSYSSYGQSQNTGYGTQSTPQGYGSTGGYGSSQSSQSSYGQQSSYPGYGQQPAPSSTSGSYGSSSQSSSYGQPQSGSYSQQPSYGGQQQSYGQQQSYNPPQGYGQQNQYNSSSGGGGGGGGGGNYGQDQSSMSSGGGSGGGYGNQDQSGGGGSGGYGQQDRGGRGRGGSGGGGGGGGGGYNRSSGGYEPRGRGGGRGGRGGMGGSDRGGFNKFGGPRDQGSRHDSEQDNSDNNTIFVQGLGENVTIESVADYFKQIGIIKTNKKTGQPMINLYTDRETGKLKGEATVSFDDPPSAKAAIDWFDGKEFSGNPIKVSFATRRADFNRGGGNGRGGRGRGGPMGRGGYGGGGSGGGGRGGFPSGGGGGGGQQRAGDWKCPNPTCENMNFSWRNECNQCKAPKPDGPGGGPGGSHMGGNYGDDRRGGRGGAIANLVAQLENEVASLENENETLKKKNLHKKDLIAYLEKEIANLRKKIEEGKPIPNPLLGLDSTGAPGSAGSAAGSGACPVPLQLPPLERLTLDDKKPLNTLISATGLWMSRTGTIHKIKHHEVSRSKIYIEMACGDHLVVNNSRSSRTARALRHHKYRKTCKRCRVSDEDLNKFLTKANEDQTSVKVKVVSAPTRTKKAMPKSVARAPKPLENTEAAQAQPSGSKFSPAIPVSTQESVSVPASVSTSISSISTGATASALVKGNTNPITSMSAPVQASAPALTKSQTDRLEVLLNPKDEISLNSGKPFRELESELLSRRKKDLQQIYAEERENYLGKLEREITRFFVDRGFLEIKSPILIPLEYIERMGIDNDTELSKQIFRVDKNFCLRPMLAPNLANYLRKLDRALPDPIKIFEIGPCYRKESDGKEHLEEFTMLNFCQMGSGCTRENLESIITDFLNHLGIDFKIVGDSCMVFGDTLDVMHGDLELSSAVVGPIPLDREWGIDKPWIGAGFGLERLLKVKHDFKNIKRAARSESYYNGISTNL

SEQ ID NO: 575 - DNA, 3105 bp, Artificial Sequence
  Description of Artificial Sequence: Synthetic polynucleotide
  LCK::FUS::SYNZIP3::PylRS(AF)
atgggctgcgtgtgcagcagcaaccccgagggtaccgagctcatggcctcaaacgattatacccaacaagcaacccaaagctatggggcctaccccacccagcccgggcagggctattcccagcagagcagtcagccctacggacagcagagttacagtggttatagccagtccacggacacttcaggatatggccagagcagctattcttcttatggccagagccagaacacaggctatggaactcagtcaactccccagggatatggctcgactggcggctatggcagtagccagagctcccaatcgtcttacgggcagcagtcctcctaccctggctatggccagcagccagctcccagcagcacctcgggaagttacggtagcagttctcagagcagcagctatgggcagccccagagtgggagctacagccagcagcctagctatggtggacagcagcaaagctatggacagcagcaaagctataatccccctcagggctatggacagcagaaccagtacaacagcagcagtggtggtggaggtggaggtggaggtggaggtaactatggccaagatcaatcctccatgagtagtggtggtggcagtggtggcggttatggcaatcaagaccagagtggtggaggtggcagcggtggctatggacagcaggaccgtggaggccgcggcaggggtggcagtggtggcggcggcggcggcggcggtggtggttacaaccgcagcagtggtggctatgaacccagaggtcgtggaggtggccgtggaggcagaggtggcatgggcggaagtgaccgtggtggcttcaataaatttggtggccctcgggaccaaggatcacgtcatgactccgaacaggataattcagacaacaacaccatctttgtgcaaggcctgggtgagaatgttacaattgagtctgtggctgattacttcaagcagattggtattattaagacaaacaagaaaacgggacagcccatgattaatttgtacacagacagggaaactggcaagctgaagggagaggcaacggtctcttttgatgacccaccttcagctaaagcagctattgactggtttgatggtaaagaattctccggaaatcctatcaaggtctcatttgctactcgccgggcagactttaatcggggtggtggcaatggtcgtggaggccgagggcgaggaggacccatgggccgtggaggctatggaggtggtggcagtggtggtggtggccgaggaggatttcccagtggaggtggtggcggtggaggacagcagcgagctggtgactggaagtgtcctaatcccacctgtgagaatatgaacttctcttggaggaatgaatgcaaccagtgtaaggcccctaaaccagatggcccaggagggggaccaggtggctctcacatggggggtaactacggggatgatcgtcgtggtggcagaggaggcgcgatcgcaaatgaggtgaccaccctggaaaacgacgccgccttcatcgagaacgagaacgcctacctggaaaaagagatcgccagactgagaaaggaaaaggccgctctgcggaacagactggcccacaagaagggcaagcctattcccaaccccctgctgggcctggatagcaccggagcaccaggaagtgctggttctgctgctggtagtggagcgtgcccggtgccgctgcagctgccgccgctggaacgcctgaccctggatgacaaaaaaccgctgaataccctgatctctgctactggtctgtggatgagtcgtaccggaaccattcataaaatcaaacaccacgaggttagccgttcgaaaatctatattgagatggcgtgtggcgatcatctggttgtgaacaatagccgctcttctcgtacagcacgtgcactgcgtcaccacaaatatcgtaaaacctgtaaacgttgccgtgtgtccgatgaggatctgaacaaattcctgacaaaagccaatgaggaccaaacaagcgtgaaagtgaaagtcgttagcgctcctacccgtactaaaaaagcaatgccgaaatccgttgctcgtgcccctaaaccactggaaaacactgaagcagcacaggcacagccgtctggaagcaaattctctccggccattcctgtttctacccaggagtccgtttctgttccagcaagtgtgagcaccagcattagcagtattagcaccggtgccaccgctagcgccctggttaaaggcaataccaatccgattacaagcatgtctgccccggttcaagcatcagctccagcactgacaaaatcccaaaccgatcgtctggaggttctgctgaatccgaaagacgaaatcagcctgaattccggcaaaccgtttcgtgaactggagagcgaactgctgtcacgtcgtaaaaaagacctgcaacaaatctatgccgaagaacgtgagaactatctggggaaactggaacgtgaaatcacccgctttttcgtggatcgtggctttctggagatcaaatccccgattctgattcctctggagtatatcgagcgtatgggcatcgacaatgataccgaactgagcaaacaaattttccgtgtggataaaaacttctgtctgcgccctatgctagcaccaaatctggctaactatctgcgcaaactggaccgtgccctgcctgatcctatcaaaatcttcgagatcggcccgtgttatcgtaaagagtccgacggtaaagaacatctggaggagtttaccatgctgaacttttgccaaatgggttcaggttgtactcgtgagaacctggaaagcatcatcaccgattttctgaaccacctgggcattgacttcaaaattgtgggcgacagctgtatggtgtttggcgacaccctggatgtcatgcacggcgacctggaactgtctagtgccgttgtgggcccaatcccgctggatcgtgagtggggtatcgacaaaccttggatcggtgcgggttttggtctggagcgtctgctgaaagtaaaacacgacttcaagaacatcaaacgtgctgcacgttccgagtcctattacaatggtatttctactaacctgtaa

SEQ ID NO: 576 - protein, 1034 aa, Artificial Sequence
  Description of Artificial Sequence: Synthetic polypeptide
  LCK::FUS::SYNZIP3::PylRS(AF)
MGCVCSSNPEGTELMASNDYTQQATQSYGAYPTQPGQGYSQQSSQPYGQQSYSGYSQSTDTSGYGQSSYSSYGQSQNTGYGTQSTPQGYGSTGGYGSSQSSQSSYGQQSSYPGYGQQPAPSSTSGSYGSSSQSSSYGQPQSGSYSQQPSYGGQQQSYGQQQSYNPPQGYGQQNQYNSSSGGGGGGGGGGNYGQDQSSMSSGGGSGGGYGNQDQSGGGGSGGYGQQDRGGRGRGGSGGGGGGGGGGYNRSSGGYEPRGRGGGRGGRGGMGGSDRGGFNKFGGPRDQGSRHDSEQDNSDNNTIFVQGLGENVTIESVADYFKQIGIIKTNKKTGQPMINLYTDRETGKLKGEATVSFDDPPSAKAAIDWFDGKEFSGNPIKVSFATRRADFNRGGGNGRGGRGRGGPMGRGGYGGGGSGGGGRGGFPSGGGGGGGQQRAGDWKCPNPTCENMNFSWRNECNQCKAPKPDGPGGGPGGSHMGGNYGDDRRGGRGGAIANEVTTLENDAAFIENENAYLEKEIARLRKEKAALRNRLAHKKGKPIPNPLLGLDSTGAPGSAGSAAGSGACPVPLQLPPLERLTLDDKKPLNTLISATGLWMSRTGTIHKIKHHEVSRSKIYIEMACGDHLVVNNSRSSRTARALRHHKYRKTCKRCRVSDEDLNKFLTKANEDQTSVKVKVVSAPTRTKKAMPKSVARAPKPLENTEAAQAQPSGSKFSPAIPVSTQESVSVPASVSTSISSISTGATASALVKGNTNPITSMSAPVQASAPALTKSQTDRLEVLLNPKDEISLNSGKPFRELESELLSRRKKDLQQIYAEERENYLGKLEREITRFFVDRGFLEIKSPILIPLEYIERMGIDNDTELSKQIFRVDKNFCLRPMLAPNLANYLRKLDRALPDPIKIFEIGPCYRKESDGKEHLEEFTMLNFCQMGSGCTRENLESIITDFLNHLGIDFKIVGDSCMVFGDTLDVMHGDLELSSAVVGPIPLDREWGIDKPWIGAGFGLERLLKVKHDFKNIKRAARSESYYNGISTNL

SEQ ID NO: 577 - DNA, 3087 bp, Artificial Sequence
  Description of Artificial Sequence: Synthetic polynucleotide
  TOM20::EWSR1::SYNZIP4::2xPCP
atggtgggtcggaacagcgccatcgccgccggtgtatgcggggcccttttcattgggtactgcatctacttcgaccgcaaaagacgaagtgaccccaacttcaagaacaggcttcgagaacgaagaaagaaacagaagcttgccaaggagagagctgggctttccaagttacctgaccttaaagatgctgaagctgttcagaagttcttcatggcgtccacggattacagtacctatagccaagctgcagcgcagcagggctacagtgcttacaccgcccagcccactcaaggatatgcacagaccacccaggcatatgggcaacaaagctatggaacctatggacagcccactgatgtcagctatacccaggctcagaccactgcaacctatgggcagaccgcctatgcaacttcttatggacagcctcccactggttatactactccaactgccccccaggcatacagccagcctgtccaggggtatggcactggtgcttatgataccaccactgctacagtcaccaccacccaggcctcctatgcagctcagtctgcatatggcactcagcctgcttatccagcctatgggcagcagccagcagccactgcacctacaagaccgcaggatggaaacaagcccactgagactagtcaacctcaatctagcacagggggttacaaccagcccagcctaggatatggacagagtaactacagttatccccaggtacctgggagctaccccatgcagccagtcactgcacctccatcctaccctcctaccagctattcctctacacagccgactagttatgatcagagcagttactctcagcagaacacctatgggcaaccgagcagctatggacagcagagtagctatggtcaacaaagcagctatgggcagcagcctcccactagttacccaccccaaactggatcctacagccaagctccaagtcaatatagccaacagagcagcagctacgggcagcagagttcattccgacaggaccaccccagtagcatgggtgtttatgggcaggagtctggaggattttccggaccaggagagaaccggagcatgagtggccctgataaccggggcaggggaagagggggatttgatcgtggaggcatgagcagaggtgggcggggaggaggacgcggtggaatgggcagcgctggagagcgaggtggcttcaataagcctggtggacccatggatgaaggaccagatcttgatctaggcccacctgtagatccagatgaagactctgacaacagtgcaatttatgtacaaggattaaatgacagtgtgactctagatgatctggcagacttctttaagcagtgtggggttgttaagatgaacaagagaactgggcaacccatgatccacatctacctggacaaggaaacaggaaagcccaaaggcgatgccacagtgtcctatgaagacccacctactgccaaggctgccgtggaatggtttgatgggaaagattttcaagggagcaaacttaaagtctcccttgctcggaagaagcctccaatgaacagtatgcggggtggtctgccaccccgtgagggcagaggcatgccaccaccactccgtggaggtccaggaggcccaggaggtcctgggggacccatgggtcgcatgggaggccgtggaggagatagaggaggcttccctccaagaggaccccggggttcccgagggaacccctctggaggaggaaacgtccagcaccgagctggagactggcagtgtcccaatccgggttgtggaaaccagaacttcgcctggagaacagagtgcaaccagtgtaaggccccaaagcctgaaggcttcctcccgccaccctttccgcccccgggtggtgatcgtggcagaggtggccctggtggcatgcggggaggaagaggtggcctcatggatcgtggtggtcccggtggaatgttcagaggtggccgtggtggagacagaggtggcttccgtggtggccggggcatggaccgaggtggctttggtggaggaagacgaggtggccctggggggccccctggacctttgatggaacaggcgatcgcacaaaaggtggctgaactgaaaaatagagtggccgtgaagctgaaccggaacgagcagctgaagaacaaggtggaagagctgaagaacagaaacgcctacctgaagaatgagctggccaccctggaaaacgaggtggccagactggaaaacgacgtggccgagttaatcgcagagcagaagctgatctcagaggaggacctgatcgaaggccgccatatgctagcctccaaaaccatcgttctttcggtcggcgaggctactcgcactctgactgagatccagtccaccgcagaccgtcagatcttcgaagagaaggtcgggcctctggtgggtcggctgcgcctcacggcttcgctccgtcaaaacggagccaagaccgcgtatcgcgtcaacctaaaactggatcaggcggacgtcgttgattccggacttccgaaagtgcgctacactcaggtatggtcgcacgacgtgacaatcgttgcgaatagcaccgaggcctcgcgcaaatcgttgtacgatttgaccaagtccctcgtcgcgacctcgcaggtcgaagatcttgtcgtcaaccttgtgccgctgggccgtgcggatccgctagcctccaaaaccatcgttctttcggtcggcgaggctactcgcactctgactgagatccagtccaccgcagaccgtcagatcttcgaagagaaggtcgggcctctggtgggtcggctgcgcctcacggcttcgctccgtcaaaacggagccaagaccgcgtatcgcgtcaacctaaaactggatcaggcggacgtcgttgattccggacttccgaaagtgcgctacactcaggtatggtcgcacgacgtgacaatcgttgcgaatagcaccgaggcctcgcgcaaatcgttgtacgatttgaccaagtccctcgtcgcgacctcgcaggtcgaagatcttgtcgtcaaccttgtgccgctgggccgtccaccggtcgccacctaa

SEQ ID NO: 578 - protein, 1028 aa, Artificial Sequence
  Description of Artificial Sequence: Synthetic polypeptide
  TOM20::EWSR1::SYNZIP4::2xPCP
MVGRNSAIAAGVCGALFIGYCIYFDRKRRSDPNFKNRLRERRKKQKLAKERAGLSKLPDLKDAEAVQKFFMASTDYSTYSQAAAQQGYSAYTAQPTQGYAQTTQAYGQQSYGTYGQPTDVSYTQAQTTATYGQTAYATSYGQPPTGYTTPTAPQAYSQPVQGYGTGAYDTTTATVTTTQASYAAQSAYGTQPAYPAYGQQPAATAPTRPQDGNKPTETSQPQSSTGGYNQPSLGYGQSNYSYPQVPGSYPMQPVTAPPSYPPTSYSSTQPTSYDQSSYSQQNTYGQPSSYGQQSSYGQQSSYGQQPPTSYPPQTGSYSQAPSQYSQQSSSYGQQSSFRQDHPSSMGVYGQESGGFSGPGENRSMSGPDNRGRGRGGFDRGGMSRGGRGGGRGGMGSAGERGGFNKPGGPMDEGPDLDLGPPVDPDEDSDNSAIYVQGLNDSVTLDDLADFFKQCGVVKMNKRTGQPMIHIYLDKETGKPKGDATVSYEDPPTAKAAVEWFDGKDFQGSKLKVSLARKKPPMNSMRGGLPPREGRGMPPPLRGGPGGPGGPGGPMGRMGGRGGDRGGFPPRGPRGSRGNPSGGGNVQHRAGDWQCPNPGCGNQNFAWRTECNQCKAPKPEGFLPPPFPPPGGDRGRGGPGGMRGGRGGLMDRGGPGGMFRGGRGGDRGGFRGGRGMDRGGFGGGRRGGPGGPPGPLMEQAIAQKVAELKNRVAVKLNRNEQLKNKVEELKNRNAYLKNELATLENEVARLENDVAELIAEQKLISEEDLIEGRHMLASKTIVLSVGEATRTLTEIQSTADRQIFEEKVGPLVGRLRLTASLRQNGAKTAYRVNLKLDQADVVDSGLPKVRYTQVWSHDVTIVANSTEASRKSLYDLTKSLVATSQVEDLVVNLVPLGRADPLASKTIVLSVGEATRTLTEIQSTADRQIFEEKVGPLVGRLRLTASLRQNGAKTAYRVNLKLDQADVVDSGLPKVRYTQVWSHDVTIVANSTEASRKSLYDLTKSLVATSQVEDLVVNLVPLGRPPVAT

SEQ ID NO: 579 - DNA, 3072 bp, Artificial Sequence
  Description of Artificial Sequence: Synthetic polynucleotide
  TOM20::EWSR1::SYNZIP2::2xPCP
atggtgggtcggaacagcgccatcgccgccggtgtatgcggggcccttttcattgggtactgcatctacttcgaccgcaaaagacgaagtgaccccaacttcaagaacaggcttcgagaacgaagaaagaaacagaagcttgccaaggagagagctgggctttccaagttacctgaccttaaagatgctgaagctgttcagaagttcttcatggcgtccacggattacagtacctatagccaagctgcagcgcagcagggctacagtgcttacaccgcccagcccactcaaggatatgcacagaccacccaggcatatgggcaacaaagctatggaacctatggacagcccactgatgtcagctatacccaggctcagaccactgcaacctatgggcagaccgcctatgcaacttcttatggacagcctcccactggttatactactccaactgccccccaggcatacagccagcctgtccaggggtatggcactggtgcttatgataccaccactgctacagtcaccaccacccaggcctcctatgcagctcagtctgcatatggcactcagcctgcttatccagcctatgggcagcagccagcagccactgcacctacaagaccgcaggatggaaacaagcccactgagactagtcaacctcaatctagcacagggggttacaaccagcccagcctaggatatggacagagtaactacagttatccccaggtacctgggagctaccccatgcagccagtcactgcacctccatcctaccctcctaccagctattcctctacacagccgactagttatgatcagagcagttactctcagcagaacacctatgggcaaccgagcagctatggacagcagagtagctatggtcaacaaagcagctatgggcagcagcctcccactagttacccaccccaaactggatcctacagccaagctccaagtcaatatagccaacagagcagcagctacgggcagcagagttcattccgacaggaccaccccagtagcatgggtgtttatgggcaggagtctggaggattttccggaccaggagagaaccggagcatgagtggccctgataaccggggcaggggaagagggggatttgatcgtggaggcatgagcagaggtgggcggggaggaggacgcggtggaatgggcagcgctggagagcgaggtggcttcaataagcctggtggacccatggatgaaggaccagatcttgatctaggcccacctgtagatccagatgaagactctgacaacagtgcaatttatgtacaaggattaaatgacagtgtgactctagatgatctggcagacttctttaagcagtgtggggttgttaagatgaacaagagaactgggcaacccatgatccacatctacctggacaaggaaacaggaaagcccaaaggcgatgccacagtgtcctatgaagacccacctactgccaaggctgccgtggaatggtttgatgggaaagattttcaagggagcaaacttaaagtctcccttgctcggaagaagcctccaatgaacagtatgcggggtggtctgccaccccgtgagggcagaggcatgccaccaccactccgtggaggtccaggaggcccaggaggtcctgggggacccatgggtcgcatgggaggccgtggaggagatagaggaggcttccctccaagaggaccccggggttcccgagggaacccctctggaggaggaaacgtccagcaccgagctggagactggcagtgtcccaatccgggttgtggaaaccagaacttcgcctggagaacagagtgcaaccagtgtaaggccccaaagcctgaaggcttcctcccgccaccctttccgcccccgggtggtgatcgtggcagaggtggccctggtggcatgcggggaggaagaggtggcctcatggatcgtggtggtcccggtggaatgttcagaggtggccgtggtggagacagaggtggcttccgtggtggccggggcatggaccgaggtggctttggtggaggaagacgaggtggccctggggggccccctggacctttgatggaacaggcgatcgcagctagaaacgcctacctgagaaagaaaatcgccagactgaagaaggacaacctgcagctggaaagagacgagcagaacctggaaaagatcatcgccaacctcagagatgagatcgccagactggaaaacgaggtggccagccacgagcagttaatcgcatacccctacgacgtgcccgactacgccatcgaaggccgccatatgctagcctccaaaaccatcgttctttcggtcggcgaggctactcgcactctgactgagatccagtccaccgcagaccgtcagatcttcgaagagaaggtcgggcctctggtgggtcggctgcgcctcacggcttcgctccgtcaaaacggagccaagaccgcgtatcgcgtcaacctaaaactggatcaggcggacgtcgttgattccggacttccgaaagtgcgctacactcaggtatggtcgcacgacgtgacaatcgttgcgaatagcaccgaggcctcgcgcaaatcgttgtacgatttgaccaagtccctcgtcgcgacctcgcaggtcgaagatcttgtcgtcaaccttgtgccgctgggccgtgcggatccgctagcctccaaaaccatcgttctttcggtcggcgaggctactcgcactctgactgagatccagtccaccgcagaccgtcagatcttcgaagagaaggtcgggcctctggtgggtcggctgcgcctcacggcttcgctccgtcaaaacggagccaagaccgcgtatcgcgtcaacctaaaactggatcaggcggacgtcgttgattccggacttccgaaagtgcgctacactcaggtatggtcgcacgacgtgacaatcgttgcgaatagcaccgaggcctcgcgcaaatcgttgtacgatttgaccaagtccctcgtcgcgacctcgcaggtcgaagatcttgtcgtcaaccttgtgccgctgggccgtccaccggtcgccacctaa

SEQ ID NO: 580 - protein, 1023 aa, Artificial Sequence
  Description of Artificial Sequence: Synthetic polypeptide
  TOM20::EWSR1::SYNZIP2::2xPCP
MVGRNSAIAAGVCGALFIGYCIYFDRKRRSDPNFKNRLRERRKKQKLAKERAGLSKLPDLKDAEAVQKFFMASTDYSTYSQAAAQQGYSAYTAQPTQGYAQTTQAYGQQSYGTYGQPTDVSYTQAQTTATYGQTAYATSYGQPPTGYTTPTAPQAYSQPVQGYGTGAYDTTTATVTTTQASYAAQSAYGTQPAYPAYGQQPAATAPTRPQDGNKPTETSQPQSSTGGYNQPSLGYGQSNYSYPQVPGSYPMQPVTAPPSYPPTSYSSTQPTSYDQSSYSQQNTYGQPSSYGQQSSYGQQSSYGQQPPTSYPPQTGSYSQAPSQYSQQSSSYGQQSSFRQDHPSSMGVYGQESGGFSGPGENRSMSGPDNRGRGRGGFDRGGMSRGGRGGGRGGMGSAGERGGFNKPGGPMDEGPDLDLGPPVDPDEDSDNSAIYVQGLNDSVTLDDLADFFKQCGVVKMNKRTGQPMIHIYLDKETGKPKGDATVSYEDPPTAKAAVEWFDGKDFQGSKLKVSLARKKPPMNSMRGGLPPREGRGMPPPLRGGPGGPGGPGGPMGRMGGRGGDRGGFPPRGPRGSRGNPSGGGNVQHRAGDWQCPNPGCGNQNFAWRTECNQCKAPKPEGFLPPPFPPPGGDRGRGGPGGMRGGRGGLMDRGGPGGMFRGGRGGDRGGFRGGRGMDRGGFGGGRRGGPGGPPGPLMEQAIAARNAYLRKKIARLKKDNLQLERDEQNLEKIIANLRDEIARLENEVASHEQLIAYPYDVPDYAIEGRHMLASKTIVLSVGEATRTLTEIQSTADRQIFEEKVGPLVGRLRLTASLRQNGAKTAYRVNLKLDQADVVDSGLPKVRYTQVWSHDVTIVANSTEASRKSLYDLTKSLVATSQVEDLVVNLVPLGRADPLASKTIVLSVGEATRTLTEIQSTADRQIFEEKVGPLVGRLRLTASLRQNGAKTAYRVNLKLDQADVVDSGLPKVRYTQVWSHDVTIVANSTEASRKSLYDLTKSLVATSQVEDLVVNLVPLGRPPVAT

SEQ ID NO: 581 - DNA, 3660 bp, Artificial Sequence
  Description of Artificial Sequence: Synthetic polynucleotide
  KIF16B::EWSR1::SYNZIP2::MCP
atggcatcggtcaaggtggccgtgagggtccggcccatgaatcgcagggaaaaggacttggaggccaagttcattattcagatggagaaaagcaaaacgacaatcacaaacttaaagataccagaaggaggcactggggactcaggaagagaacggaccaagaccttcacctatgacttttctttttattctgctgatacaaaaagcccagattacgtttcacaagaaatggttttcaaaaccctcggcacagatgtcgtgaagtctgcatttgaaggttataatgcttgtgtctttgcatatgggcaaactggatctggaaagtcatacactatgatgggaaattctggagattctggcttaatacctcggatctgtgaaggactcttcagtcggataaatgaaaccaccagatgggatgaagcttcttttcgaactgaagtcagctacttagaaatttataacgaacgtgtgagagatctacttcggcggaagtcatctaaaaccttcaatttgagagtccgtgagcatcccaaagaaggcccttatgttgaggatttatccaaacatttagtacagaattatggtgacgtagaagaacttatggatgcgggcaatatcaaccggaccaccgcagcgactgggatgaacgacgtcagtagcaggtctcatgccatcttcaccatcaagttcactcaggctaaatttgattctgaaatgccatgtgaaaccgtcagtaagatccacttggttgatcttgccggaagtgagcgtgcagatgccaccggagccaccggggttaggctaaaggaagggggaaatattaacaagtccctcgtgactctggggaacgtcatttctgccttagctgatttatctcaggatgctgcaaatactcttgcaaagaagaagcaagttttcgtgccttacagggattctgtgttgacttggttgttaaaagatagccttggaggaaactctaaaactatcatgattgccaccatttcacctgctgatgtcaattatggagaaaccctaagtactcttcgctatgcaaatagagccaaaaacatcatcaacaagcctaccattaatgaggatgccaacgtcaaacttatccgtgagctgcgagctgaaatagccagactgaaaacgctgcttgctcaagggaatcagattgccctcttagactcccccacaatggcgtccacggattacagtacctatagccaagctgcagcgcagcagggctacagtgcttacaccgcccagcccactcaaggatatgcacagaccacccaggcatatgggcaacaaagctatggaacctatggacagcccactgatgtcagctatacccaggctcagaccactgcaacctatgggcagaccgcctatgcaacttcttatggacagcctcccactggttatactactccaactgccccccaggcatacagccagcctgtccaggggtatggcactggtgcttatgataccaccactgctacagtcaccaccacccaggcctcctatgcagctcagtctgcatatggcactcagcctgcttatccagcctatgggcagcagccagcagccactgcacctacaagaccgcaggatggaaacaagcccactgagactagtcaacctcaatctagcacagggggttacaaccagcccagcctaggatatggacagagtaactacagttatccccaggtacctgggagctaccccatgcagccagtcactgcacctccatcctaccctcctaccagctattcctctacacagccgactagttatgatcagagcagttactctcagcagaacacctatgggcaaccgagcagctatggacagcagagtagctatggtcaacaaagcagctatgggcagcagcctcccactagttacccaccccaaactggatcctacagccaagctccaagtcaatatagccaacagagcagcagctacgggcagcagagttcattccgacaggaccaccccagtagcatgggtgtttatgggcaggagtctggaggattttccggaccaggagagaaccggagcatgagtggccctgataaccggggcaggggaagagggggatttgatcgtggaggcatgagcagaggtgggcggggaggaggacgcggtggaatgggcagcgctggagagcgaggtggcttcaataagcctggtggacccatggatgaaggaccagatcttgatctaggcccacctgtagatccagatgaagactctgacaacagtgcaatttatgtacaaggattaaatgacagtgtgactctagatgatctggcagacttctttaagcagtgtggggttgttaagatgaacaagagaactgggcaacccatgatccacatctacctggacaaggaaacaggaaagcccaaaggcgatgccacagtgtcctatgaagacccacctactgccaaggctgccgtggaatggtttgatgggaaagattttcaagggagcaaacttaaagtctcccttgctcggaagaagcctccaatgaacagtatgcggggtggtctgccaccccgtgagggcagaggcatgccaccaccactccgtggaggtccaggaggcccaggaggtcctgggggacccatgggtcgcatgggaggccgtggaggagatagaggaggcttccctccaagaggaccccggggttcccgagggaacccctctggaggaggaaacgtccagcaccgagctggagactggcagtgtcccaatccgggttgtggaaaccagaacttcgcctggagaacagagtgcaaccagtgtaaggccccaaagcctgaaggcttcctcccgccaccctttccgcccccgggtggtgatcgtggcagaggtggccctggtggcatgcggggaggaagaggtggcctcatggatcgtggtggtcccggtggaatgttcagaggtggccgtggtggagacagaggtggcttccgtggtggccggggcatggaccgaggtggctttggtggaggaagacgaggtggccctggggggccccctggacctttgatggaacaggcgatcgcagctagaaacgcctacctgagaaagaaaatcgccagactgaagaaggacaacctgcagctggaaagagacgagcagaacctggaaaagatcatcgccaacctcagagatgagatcgccagactggaaaacgaggtggccagccacgagcagtatccctatgatgtgccggattatgctggagcaccaggaagtgctggttctgctgctggtagtggagcttctaactttactcagttcgttctcgtcgacaatggcggaactggcgacgtgactgtcgccccaagcaacttcgctaacgggatcgctgaatggatcagctctaactcgcgttcacaggcttacaaagtaacctgtagcgttcgtcagagctctgcgcagaatcgcaaatacaccatcaaagtcgaggtgcctaaaggcgcctggcgttcgtacttaaatatggaactaaccattccaattttcgccacgaattccgactgcgagcttattgttaaggcaatgcaaggtctcctaaaagatggaaacccgattccctcagcaatcgcagcaaactccggcatctactaa

SEQ ID NO: 582 - protein, 1219 aa, Artificial Sequence
  Description of Artificial Sequence: Synthetic polypeptide
  KIF16B::EWSR1::SYNZIP2::MCP
MASVKVAVRVRPMNRREKDLEAKFIIQMEKSKTTITNLKIPEGGTGDSGRERTKTFTYDFSFYSADTKSPDYVSQEMVFKTLGTDVVKSAFEGYNACVFAYGQTGSGKSYTMMGNSGDSGLIPRICEGLFSRINETTRWDEASFRTEVSYLEIYNERVRDLLRRKSSKTFNLRVREHPKEGPYVEDLSKHLVQNYGDVEELMDAGNINRTTAATGMNDVSSRSHAIFTIKFTQAKFDSEMPCETVSKIHLVDLAGSERADATGATGVRLKEGGNINKSLVTLGNVISALADLSQDAANTLAKKKQVFVPYRDSVLTWLLKDSLGGNSKTIMIATISPADVNYGETLSTLRYANRAKNIINKPTINEDANVKLIRELRAEIARLKTLLAQGNQIALLDSPTMASTDYSTYSQAAAQQGYSAYTAQPTQGYAQTTQAYGQQSYGTYGQPTDVSYTQAQTTATYGQTAYATSYGQPPTGYTTPTAPQAYSQPVQGYGTGAYDTTTATVTTTQASYAAQSAYGTQPAYPAYGQQPAATAPTRPQDGNKPTETSQPQSSTGGYNQPSLGYGQSNYSYPQVPGSYPMQPVTAPPSYPPTSYSSTQPTSYDQSSYSQQNTYGQPSSYGQQSSYGQQSSYGQQPPTSYPPQTGSYSQAPSQYSQQSSSYGQQSSFRQDHPSSMGVYGQESGGFSGPGENRSMSGPDNRGRGRGGFDRGGMSRGGRGGGRGGMGSAGERGGFNKPGGPMDEGPDLDLGPPVDPDEDSDNSAIYVQGLNDSVTLDDLADFFKQCGVVKMNKRTGQPMIHIYLDKETGKPKGDATVSYEDPPTAKAAVEWFDGKDFQGSKLKVSLARKKPPMNSMRGGLPPREGRGMPPPLRGGPGGPGGPGGPMGRMGGRGGDRGGFPPRGPRGSRGNPSGGGNVQHRAGDWQCPNPGCGNQNFAWRTECNQCKAPKPEGFLPPPFPPPGGDRGRGGPGGMRGGRGGLMDRGGPGGMFRGGRGGDRGGFRGGRGMDRGGFGGGRRGGPGGPPGPLMEQAIAARNAYLRKKIARLKKDNLQLERDEQNLEKIIANLRDEIARLENEVASHEQYPYDVPDYAGAPGSAGSAAGSGASNFTQFVLVDNGGTGDVTVAPSNFANGIAEWISSNSRSQAYKVTCSVRQSSAQNRKYTIKVEVPKGAWRSYLNMELTIPIFATNSDCELIVKAMQGLLKDGNPIPSAIAANSGIY

SEQ ID NO: 583 - DNA, 1674 bp, Artificial Sequence
  Description of Artificial Sequence: Synthetic polynucleotide
  LCK::SYNZIP1::PylRS(AF)
atgggctgcgtgtgcagcagcaaccccgagggtaccgagctcgcgatcgcaaatctggtggcccagctggaaaacgaggtggccagcctggaaaacgagaacgaaaccctgaagaaaaagaacctgcacaagaaggacctgatcgcctacctggaaaaggaaatcgccaacctgagaaagaagatcgaggaaggcgccgattacaaggacgatgatgacaagggagcaccaggaagtgctggttctgctgctggtagtggagcgtgcccggtgccgctgcagctgccgccgctggaacgcctgaccctggatgataaaaaaccgctgaataccctgatctctgctactggtctgtggatgagtcgtaccggaaccattcataaaatcaaacaccacgaggttagccgttcgaaaatctatattgagatggcgtgtggcgatcatctggttgtgaacaatagccgctcttctcgtacagcacgtgcactgcgtcaccacaaatatcgtaaaacctgtaaacgttgccgtgtgtccgatgaggatctgaacaaattcctgacaaaagccaatgaggaccaaacaagcgtgaaagtgaaagtcgttagcgctcctacccgtactaaaaaagcaatgccgaaatccgttgctcgtgcccctaaaccactggaaaacactgaagcagcacaggcacagccgtctggaagcaaattctctccggccattcctgtttctacccaggagtccgtttctgttccagcaagtgtgagcaccagcattagcagtattagcaccggtgccaccgctagcgccctggttaaaggcaataccaatccgattacaagcatgtctgccccggttcaagcatcagctccagcactgacaaaatcccaaaccgatcgtctggaggttctgctgaatccgaaagacgaaatcagcctgaattccggcaaaccgtttcgtgaactggagagcgaactgctgtcacgtcgtaaaaaagacctgcaacaaatctatgccgaagaacgtgagaactatctggggaaactggaacgtgaaatcacccgctttttcgtggatcgtggctttctggagatcaaatccccgattctgattcctctggagtatatcgagcgtatgggcatcgacaatgataccgaactgagcaaacaaattttccgtgtggataaaaacttctgtctgcgccctatgctagcaccaaatctggctaactatctgcgcaaactggaccgtgccctgcctgatcctatcaaaatcttcgagatcggcccgtgttatcgtaaagagtccgacggtaaagaacatctggaggagtttaccatgctgaacttttgccaaatgggttcaggttgtactcgtgagaacctggaaagcatcatcaccgattttctgaaccacctgggcattgacttcaaaattgtgggcgacagctgtatggtgtttggcgacaccctggatgtcatgcacggcgacctggaactgtctagtgccgttgtgggcccaatcccgctggatcgtgagtggggtatcgacaaaccttggatcggtgcgggttttggtctggagcgtctgctgaaagtaaaacacgacttcaagaacatcaaacgtgctgcacgttccgagtcctattacaatggtatttctactaacctgtaa

SEQ ID NO: 584 - protein, 557 aa, Artificial Sequence
  Description of Artificial Sequence: Synthetic polypeptide
  LCK::SYNZIP1::PylRS(AF)
MGCVCSSNPEGTELAIANLVAQLENEVASLENENETLKKKNLHKKDLIAYLEKEIANLRKKIEEGADYKDDDDKGAPGSAGSAAGSGACPVPLQLPPLERLTLDDKKPLNTLISATGLWMSRTGTIHKIKHHEVSRSKIYIEMACGDHLVVNNSRSSRTARALRHHKYRKTCKRCRVSDEDLNKFLTKANEDQTSVKVKVVSAPTRTKKAMPKSVARAPKPLENTEAAQAQPSGSKFSPAIPVSTQESVSVPASVSTSISSISTGATASALVKGNTNPITSMSAPVQASAPALTKSQTDRLEVLLNPKDEISLNSGKPFRELESELLSRRKKDLQQIYAEERENYLGKLEREITRFFVDRGFLEIKSPILIPLEYIERMGIDNDTELSKQIFRVDKNFCLRPMLAPNLANYLRKLDRALPDPIKIFEIGPCYRKESDGKEHLEEFTMLNFCQMGSGCTRENLESIITDFLNHLGIDFKIVGDSCMVFGDTLDVMHGDLELSSAVVGPIPLDREWGIDKPWIGAGFGLERLLKVKHDFKNIKRAARSESYYNGISTNL

SEQ ID NO: 585 - DNA, 3108 bp, Artificial Sequence
  Description of Artificial Sequence: Synthetic polynucleotide
  LCK::FUS::SYNZIP1::PylRS(AF)
atgggctgcgtgtgcagcagcaaccccgagggtaccgagctcatggcctcaaacgattatacccaacaagcaacccaaagctatggggcctaccccacccagcccgggcagggctattcccagcagagcagtcagccctacggacagcagagttacagtggttatagccagtccacggacacttcaggatatggccagagcagctattcttcttatggccagagccagaacacaggctatggaactcagtcaactccccagggatatggctcgactggcggctatggcagtagccagagctcccaatcgtcttacgggcagcagtcctcctaccctggctatggccagcagccagctcccagcagcacctcgggaagttacggtagcagttctcagagcagcagctatgggcagccccagagtgggagctacagccagcagcctagctatggtggacagcagcaaagctatggacagcagcaaagctataatccccctcagggctatggacagcagaaccagtacaacagcagcagtggtggtggaggtggaggtggaggtggaggtaactatggccaagatcaatcctccatgagtagtggtggtggcagtggtggcggttatggcaatcaagaccagagtggtggaggtggcagcggtggctatggacagcaggaccgtggaggccgcggcaggggtggcagtggtggcggcggcggcggcggcggtggtggttacaaccgcagcagtggtggctatgaacccagaggtcgtggaggtggccgtggaggcagaggtggcatgggcggaagtgaccgtggtggcttcaataaatttggtggccctcgggaccaaggatcacgtcatgactccgaacaggataattcagacaacaacaccatctttgtgcaaggcctgggtgagaatgttacaattgagtctgtggctgattacttcaagcagattggtattattaagacaaacaagaaaacgggacagcccatgattaatttgtacacagacagggaaactggcaagctgaagggagaggcaacggtctcttttgatgacccaccttcagctaaagcagctattgactggtttgatggtaaagaattctccggaaatcctatcaaggtctcatttgctactcgccgggcagactttaatcggggtggtggcaatggtcgtggaggccgagggcgaggaggacccatgggccgtggaggctatggaggtggtggcagtggtggtggtggccgaggaggatttcccagtggaggtggtggcggtggaggacagcagcgagctggtgactggaagtgtcctaatcccacctgtgagaatatgaacttctcttggaggaatgaatgcaaccagtgtaaggcccctaaaccagatggcccaggagggggaccaggtggctctcacatggggggtaactacggggatgatcgtcgtggtggcagaggtggtgcgatcgcaaatctggtggcccagctggaaaacgaggtggccagcctggaaaacgagaacgaaaccctgaagaaaaagaacctgcacaagaaggacctgatcgcctacctggaaaaggaaatcgccaacctgagaaagaagatcgaggaaggcgccgattacaaggacgatgatgacaagggagcaccaggaagtgctggttctgctgctggtagtggagcgtgcccggtgccgctgcagctgccgccgctggaacgcctgaccctggatgataaaaaaccgctgaataccctgatctctgctactggtctgtggatgagtcgtaccggaaccattcataaaatcaaacaccacgaggttagccgttcgaaaatctatattgagatggcgtgtggcgatcatctggttgtgaacaatagccgctcttctcgtacagcacgtgcactgcgtcaccacaaatatcgtaaaacctgtaaacgttgccgtgtgtccgatgaggatctgaacaaattcctgacaaaagccaatgaggaccaaacaagcgtgaaagtgaaagtcgttagcgctcctacccgtactaaaaaagcaatgccgaaatccgttgctcgtgcccctaaaccactggaaaacactgaagcagcacaggcacagccgtctggaagcaaattctctccggccattcctgtttctacccaggagtccgtttctgttccagcaagtgtgagcaccagcattagcagtattagcaccggtgccaccgctagcgccctggttaaaggcaataccaatccgattacaagcatgtctgccccggttcaagcatcagctccagcactgacaaaatcccaaaccgatcgtctggaggttctgctgaatccgaaagacgaaatcagcctgaattccggcaaaccgtttcgtgaactggagagcgaactgctgtcacgtcgtaaaaaagacctgcaacaaatctatgccgaagaacgtgagaactatctggggaaactggaacgtgaaatcacccgctttttcgtggatcgtggctttctggagatcaaatccccgattctgattcctctggagtatatcgagcgtatgggcatcgacaatgataccgaactgagcaaacaaattttccgtgtggataaaaacttctgtctgcgccctatgctagcaccaaatctggctaactatctgcgcaaactggaccgtgccctgcctgatcctatcaaaatcttcgagatcggcccgtgttatcgtaaagagtccgacggtaaagaacatctggaggagtttaccatgctgaacttttgccaaatgggttcaggttgtactcgtgagaacctggaaagcatcatcaccgattttctgaaccacctgggcattgacttcaaaattgtgggcgacagctgtatggtgtttggcgacaccctggatgtcatgcacggcgacctggaactgtctagtgccgttgtgggcccaatcccgctggatcgtgagtggggtatcgacaaaccttggatcggtgcgggttttggtctggagcgtctgctgaaagtaaaacacgacttcaagaacatcaaacgtgctgcacgttccgagtcctattacaatggtatttctactaacctgtaa

SEQ ID NO: 586 - protein, 1035 aa, Artificial Sequence
  Description of Artificial Sequence: Synthetic polypeptide
  LCK::FUS::SYNZIP1::PylRS(AF)
MGCVCSSNPEGTELMASNDYTQQATQSYGAYPTQPGQGYSQQSSQPYGQQSYSGYSQSTDTSGYGQSSYSSYGQSQNTGYGTQSTPQGYGSTGGYGSSQSSQSSYGQQSSYPGYGQQPAPSSTSGSYGSSSQSSSYGQPQSGSYSQQPSYGGQQQSYGQQQSYNPPQGYGQQNQYNSSSGGGGGGGGGGNYGQDQSSMSSGGGSGGGYGNQDQSGGGGSGGYGQQDRGGRGRGGSGGGGGGGGGGYNRSSGGYEPRGRGGGRGGRGGMGGSDRGGFNKFGGPRDQGSRHDSEQDNSDNNTIFVQGLGENVTIESVADYFKQIGIIKTNKKTGQPMINLYTDRETGKLKGEATVSFDDPPSAKAAIDWFDGKEFSGNPIKVSFATRRADFNRGGGNGRGGRGRGGPMGRGGYGGGGSGGGGRGGFPSGGGGGGGQQRAGDWKCPNPTCENMNFSWRNECNQCKAPKPDGPGGGPGGSHMGGNYGDDRRGGRGGAIANLVAQLENEVASLENENETLKKKNLHKKDLIAYLEKEIANLRKKIEEGADYKDDDDKGAPGSAGSAAGSGACPVPLQLPPLERLTLDDKKPLNTLISATGLWMSRTGTIHKIKHHEVSRSKIYIEMACGDHLVVNNSRSSRTARALRHHKYRKTCKRCRVSDEDLNKFLTKANEDQTSVKVKVVSAPTRTKKAMPKSVARAPKPLENTEAAQAQPSGSKFSPAIPVSTQESVSVPASVSTSISSISTGATASALVKGNTNPITSMSAPVQASAPALTKSQTDRLEVLLNPKDEISLNSGKPFRELESELLSRRKKDLQQIYAEERENYLGKLEREITRFFVDRGFLEIKSPILIPLEYIERMGIDNDTELSKQIFRVDKNFCLRPMLAPNLANYLRKLDRALPDPIKIFEIGPCYRKESDGKEHLEEFTMLNFCQMGSGCTRENLESIITDFLNHLGIDFKIVGDSCMVFGDTLDVMHGDLELSSAVVGPIPLDREWGIDKPWIGAGFGLERLLKVKHDFKNIKRAARSESYYNGISTNL

SEQ ID NO: 587 - DNA, 735 bp, Artificial Sequence
  Description of Artificial Sequence: Synthetic polynucleotide
  SYNZIP4::4xlambdaN22
atggcgatcgcacaaaaggtggctgaactgaaaaatagagtggccgtgaagctgaaccggaacgagcagctgaagaacaaggtggaagagctgaagaacagaaacgcctacctgaagaatgagctggccaccctggaaaacgaggtggccagactggaaaacgacgtggccgagggagcaccaggaagtgctggttctgctgctggtagtggagagcagaagctgatctcagaggaggacctgctagccaccatggacgcacaaacacgacgacgtgagcgtcgcgctgagaaacaagctcaatggaaagctgcaaacccaccgctcgacggagccggagctggcgctggagctggagccggagctggcggtctagccaccatggacgcacaaacacgacgacgtgagcgtcgcgctgagaaacaagctcaatggaaagctgcaaacccaccgctcgacggagccggagctggcgctggagctggagccggagctggcggtctagccaccatggacgcacaaacacgacgacgtgagcgtcgcgctgagaaacaagctcaatggaaagctgcaaacccaccgctcgacggagccggagctggcgctggagctggagccggagctggcggtctagccaccatggacgcacaaacacgacgacgtgagcgtcgcgctgagaaacaagctcaatggaaagctgcaaacccaccgctcgagtctagagggcccgtttaa

SEQ ID NO: 588 - protein, 244 aa, Artificial Sequence
  Description of Artificial Sequence: Synthetic polypeptide
  SYNZIP4::4xlambdaN22
MAIAQKVAELKNRVAVKLNRNEQLKNKVEELKNRNAYLKNELATLENEVARLENDVAEGAPGSAGSAAGSGEQKLISEEDLLATMDAQTRRRERRAEKQAQWKAANPPLDGAGAGAGAGAGAGGLATMDAQTRRRERRAEKQAQWKAANPPLDGAGAGAGAGAGAGGLATMDAQTRRRERRAEKQAQWKAANPPLDGAGAGAGAGAGAGGLATMDAQTRRRERRAEKQAQWKAANPPLESRGPV

SEQ ID NO: 589 - DNA, 3699 bp, Artificial Sequence
  Description of Artificial Sequence: Synthetic polynucleotide
  TOM20::FUS::SYNZIP1::MCP::PylRS(AF
atggtgggtcggaacagcgccatcgccgccggtgtatgcggggcccttttcattgggtactgcatctacttcgaccgcaaaagacgaagtgaccccaacttcaagaacaggcttcgagaacgaagaaagaaacagaagcttgccaaggagagagctgggctttccaagttacctgaccttaaagatgctgaagctgttcagaaattcttcatggcctcaaacgattatacccaacaagcaacccaaagctatggggcctaccccacccagcccgggcagggctattcccagcagagcagtcagccctacggacagcagagttacagtggttatagccagtccacggacacttcaggatatggccagagcagctattcttcttatggccagagccagaacacaggctatggaactcagtcaactccccagggatatggctcgactggcggctatggcagtagccagagctcccaatcgtcttacgggcagcagtcctcctaccctggctatggccagcagccagctcccagcagcacctcgggaagttacggtagcagttctcagagcagcagctatgggcagccccagagtgggagctacagccagcagcctagctatggtggacagcagcaaagctatggacagcagcaaagctataatccccctcagggctatggacagcagaaccagtacaacagcagcagtggtggtggaggtggaggtggaggtggaggtaactatggccaagatcaatcctccatgagtagtggtggtggcagtggtggcggttatggcaatcaagaccagagtggtggaggtggcagcggtggctatggacagcaggaccgtggaggccgcggcaggggtggcagtggtggcggcggcggcggcggcggtggtggttacaaccgcagcagtggtggctatgaacccagaggtcgtggaggtggccgtggaggcagaggtggcatgggcggaagtgaccgtggtggcttcaataaatttggtggccctcgggaccaaggatcacgtcatgactccgaacaggataattcagacaacaacaccatctttgtgcaaggcctgggtgagaatgttacaattgagtctgtggctgattacttcaagcagattggtattattaagacaaacaagaaaacgggacagcccatgattaatttgtacacagacagggaaactggcaagctgaagggagaggcaacggtctcttttgatgacccaccttcagctaaagcagctattgactggtttgatggtaaagaattctccggaaatcctatcaaggtctcatttgctactcgccgggcagactttaatcggggtggtggcaatggtcgtggaggccgagggcgaggaggacccatgggccgtggaggctatggaggtggtggcagtggtggtggtggccgaggaggatttcccagtggaggtggtggcggtggaggacagcagcgagctggtgactggaagtgtcctaatcccacctgtgagaatatgaacttctcttggaggaatgaatgcaaccagtgtaaggcccctaaaccagatggcccaggagggggaccaggtggctctcacatggggggtaactacggggatgatcgtcgtggtggcagaggaggcgcgatcgcaaatctggtggcccagctggaaaacgaggtggccagcctggaaaacgagaacgaaaccctgaagaaaaagaacctgcacaagaaggacctgatcgcctacctggaaaaggaaatcgccaacctgagaaagaagatcgaggaagcatcgatatatccctatgatgtgccggattatgctggagcaccaggaagtgctggttctgctgctggtagtggagcttctaactttactcagttcgttctcgtcgacaatggcggaactggcgacgtgactgtcgccccaagcaacttcgctaacgggatcgctgaatggatcagctctaactcgcgttcacaggcttacaaagtaacctgtagcgttcgtcagagctctgcgcagaatcgcaaatacaccatcaaagtcgaggtgcctaaaggcgcctggcgttcgtacttaaatatggaactaaccattccaattttcgccacgaattccgactgcgagcttattgttaaggcaatgcaaggtctcctaaaagatggaaacccgattccctcagcaatcgcagcaaactccggcatctacggcgccgattacaaggacgatgatgacaagggagcaccaggaagtgctggttctgctgctggtagtggagcgtgcccggtgccgctgcagctgccgccgctggaacgcctgaccctggatgataaaaaaccgctgaataccctgatctctgctactggtctgtggatgagtcgtaccggaaccattcataaaatcaaacaccacgaggttagccgttcgaaaatctatattgagatggcgtgtggcgatcatctggttgtgaacaatagccgctcttctcgtacagcacgtgcactgcgtcaccacaaatatcgtaaaacctgtaaacgttgccgtgtgtccgatgaggatctgaacaaattcctgacaaaagccaatgaggaccaaacaagcgtgaaagtgaaagtcgttagcgctcctacccgtactaaaaaagcaatgccgaaatccgttgctcgtgcccctaaaccactggaaaacactgaagcagcacaggcacagccgtctggaagcaaattctctccggccattcctgtttctacccaggagtccgtttctgttccagcaagtgtgagcaccagcattagcagtattagcaccggtgccaccgctagcgccctggttaaaggcaataccaatccgattacaagcatgtctgccccggttcaagcatcagctccagcactgacaaaatcccaaaccgatcgtctggaggttctgctgaatccgaaagacgaaatcagcctgaattccggcaaaccgtttcgtgaactggagagcgaactgctgtcacgtcgtaaaaaagacctgcaacaaatctatgccgaagaacgtgagaactatctggggaaactggaacgtgaaatcacccgctttttcgtggatcgtggctttctggagatcaaatccccgattctgattcctctggagtatatcgagcgtatgggcatcgacaatgataccgaactgagcaaacaaattttccgtgtggataaaaacttctgtctgcgccctatgctagcaccaaatctggctaactatctgcgcaaactggaccgtgccctgcctgatcctatcaaaatcttcgagatcggcccgtgttatcgtaaagagtccgacggtaaagaacatctggaggagtttaccatgctgaacttttgccaaatgggttcaggttgtactcgtgagaacctggaaagcatcatcaccgattttctgaaccacctgggcattgacttcaaaattgtgggcgacagctgtatggtgtttggcgacaccctggatgtcatgcacggcgacctggaactgtctagtgccgttgtgggcccaatcccgctggatcgtgagtggggtatcgacaaaccttggatcggtgcgggttttggtctggagcgtctgctgaaagtaaaacacgacttcaagaacatcaaacgtgctgcacgttccgagtcctattacaatggtatttctactaacctgtaa

SEQ ID NO: 590 - protein, 1232 aa, Artificial Sequence
  Description of Artificial Sequence: Synthetic polypeptide
  TOM20::FUS::SYNZIP1::MCP::PylRS(AF
MVGRNSAIAAGVCGALFIGYCIYFDRKRRSDPNFKNRLRERRKKQKLAKERAGLSKLPDLKDAEAVQKFFMASNDYTQQATQSYGAYPTQPGQGYSQQSSQPYGQQSYSGYSQSTDTSGYGQSSYSSYGQSQNTGYGTQSTPQGYGSTGGYGSSQSSQSSYGQQSSYPGYGQQPAPSSTSGSYGSSSQSSSYGQPQSGSYSQQPSYGGQQQSYGQQQSYNPPQGYGQQNQYNSSSGGGGGGGGGGNYGQDQSSMSSGGGSGGGYGNQDQSGGGGSGGYGQQDRGGRGRGGSGGGGGGGGGGYNRSSGGYEPRGRGGGRGGRGGMGGSDRGGFNKFGGPRDQGSRHDSEQDNSDNNTIFVQGLGENVTIESVADYFKQIGIIKTNKKTGQPMINLYTDRETGKLKGEATVSFDDPPSAKAAIDWFDGKEFSGNPIKVSFATRRADFNRGGGNGRGGRGRGGPMGRGGYGGGGSGGGGRGGFPSGGGGGGGQQRAGDWKCPNPTCENMNFSWRNECNQCKAPKPDGPGGGPGGSHMGGNYGDDRRGGRGGAIANLVAQLENEVASLENENETLKKKNLHKKDLIAYLEKEIANLRKKIEEASIYPYDVPDYAGAPGSAGSAAGSGASNFTQFVLVDNGGTGDVTVAPSNFANGIAEWISSNSRSQAYKVTCSVRQSSAQNRKYTIKVEVPKGAWRSYLNMELTIPIFATNSDCELIVKAMQGLLKDGNPIPSAIAANSGIYGADYKDDDDKGAPGSAGSAAGSGACPVPLQLPPLERLTLDDKKPLNTLISATGLWMSRTGTIHKIKHHEVSRSKIYIEMACGDHLVVNNSRSSRTARALRHHKYRKTCKRCRVSDEDLNKFLTKANEDQTSVKVKVVSAPTRTKKAMPKSVARAPKPLENTEAAQAQPSGSKFSPAIPVSTQESVSVPASVSTSISSISTGATASALVKGNTNPITSMSAPVQASAPALTKSQTDRLEVLLNPKDEISLNSGKPFRELESELLSRRKKDLQQIYAEERENYLGKLEREITRFFVDRGFLEIKSPILIPLEYIERMGIDNDTELSKQIFRVDKNFCLRPMLAPNLANYLRKLDRALPDPIKIFEIGPCYRKESDGKEHLEEFTMLNFCQMGSGCTRENLESIITDFLNHLGIDFKIVGDSCMVFGDTLDVMHGDLELSSAVVGPIPLDREWGIDKPWIGAGFGLERLLKVKHDFKNIKRAARSESYYNGISTNL

SEQ ID NO: 591 - DNA, 3708 bp, Artificial Sequence
  Description of Artificial Sequence: Synthetic polynucleotide
  TOM20::FUS::SYNZIP2::MCP::PylRS(AF)
atggtgggtcggaacagcgccatcgccgccggtgtatgcggggcccttttcattgggtactgcatctacttcgaccgcaaaagacgaagtgaccccaacttcaagaacaggcttcgagaacgaagaaagaaacagaagcttgccaaggagagagctgggctttccaagttacctgaccttaaagatgctgaagctgttcagaaattcttcatggcctcaaacgattatacccaacaagcaacccaaagctatggggcctaccccacccagcccgggcagggctattcccagcagagcagtcagccctacggacagcagagttacagtggttatagccagtccacggacacttcaggatatggccagagcagctattcttcttatggccagagccagaacacaggctatggaactcagtcaactccccagggatatggctcgactggcggctatggcagtagccagagctcccaatcgtcttacgggcagcagtcctcctaccctggctatggccagcagccagctcccagcagcacctcgggaagttacggtagcagttctcagagcagcagctatgggcagccccagagtgggagctacagccagcagcctagctatggtggacagcagcaaagctatggacagcagcaaagctataatccccctcagggctatggacagcagaaccagtacaacagcagcagtggtggtggaggtggaggtggaggtggaggtaactatggccaagatcaatcctccatgagtagtggtggtggcagtggtggcggttatggcaatcaagaccagagtggtggaggtggcagcggtggctatggacagcaggaccgtggaggccgcggcaggggtggcagtggtggcggcggcggcggcggcggtggtggttacaaccgcagcagtggtggctatgaacccagaggtcgtggaggtggccgtggaggcagaggtggcatgggcggaagtgaccgtggtggcttcaataaatttggtggccctcgggaccaaggatcacgtcatgactccgaacaggataattcagacaacaacaccatctttgtgcaaggcctgggtgagaatgttacaattgagtctgtggctgattacttcaagcagattggtattattaagacaaacaagaaaacgggacagcccatgattaatttgtacacagacagggaaactggcaagctgaagggagaggcaacggtctcttttgatgacccaccttcagctaaagcagctattgactggtttgatggtaaagaattctccggaaatcctatcaaggtctcatttgctactcgccgggcagactttaatcggggtggtggcaatggtcgtggaggccgagggcgaggaggacccatgggccgtggaggctatggaggtggtggcagtggtggtggtggccgaggaggatttcccagtggaggtggtggcggtggaggacagcagcgagctggtgactggaagtgtcctaatcccacctgtgagaatatgaacttctcttggaggaatgaatgcaaccagtgtaaggcccctaaaccagatggcccaggagggggaccaggtggctctcacatggggggtaactacggggatgatcgtcgtggtggcagaggaggcgcgatcgcagctagaaacgcctacctgagaaagaaaatcgccagactgaagaaggacaacctgcagctggaaagagacgagcagaacctggaaaagatcatcgccaacctcagagatgagatcgccagactggaaaacgaggtggccagccacgagcaggcatcgatatatccctatgatgtgccggattatgctggagcaccaggaagtgctggttctgctgctggtagtggagcttctaactttactcagttcgttctcgtcgacaatggcggaactggcgacgtgactgtcgccccaagcaacttcgctaacgggatcgctgaatggatcagctctaactcgcgttcacaggcttacaaagtaacctgtagcgttcgtcagagctctgcgcagaatcgcaaatacaccatcaaagtcgaggtgcctaaaggcgcctggcgttcgtacttaaatatggaactaaccattccaattttcgccacgaattccgactgcgagcttattgttaaggcaatgcaaggtctcctaaaagatggaaacccgattccctcagcaatcgcagcaaactccggcatctacggcgccgattacaaggacgatgatgacaagggagcaccaggaagtgctggttctgctgctggtagtggagcgtgcccggtgccgctgcagctgccgccgctggaacgcctgaccctggatgataaaaaaccgctgaataccctgatctctgctactggtctgtggatgagtcgtaccggaaccattcataaaatcaaacaccacgaggttagccgttcgaaaatctatattgagatggcgtgtggcgatcatctggttgtgaacaatagccgctcttctcgtacagcacgtgcactgcgtcaccacaaatatcgtaaaacctgtaaacgttgccgtgtgtccgatgaggatctgaacaaattcctgacaaaagccaatgaggaccaaacaagcgtgaaagtgaaagtcgttagcgctcctacccgtactaaaaaagcaatgccgaaatccgttgctcgtgcccctaaaccactggaaaacactgaagcagcacaggcacagccgtctggaagcaaattctctccggccattcctgtttctacccaggagtccgtttctgttccagcaagtgtgagcaccagcattagcagtattagcaccggtgccaccgctagcgccctggttaaaggcaataccaatccgattacaagcatgtctgccccggttcaagcatcagctccagcactgacaaaatcccaaaccgatcgtctggaggttctgctgaatccgaaagacgaaatcagcctgaattccggcaaaccgtttcgtgaactggagagcgaactgctgtcacgtcgtaaaaaagacctgcaacaaatctatgccgaagaacgtgagaactatctggggaaactggaacgtgaaatcacccgctttttcgtggatcgtggctttctggagatcaaatccccgattctgattcctctggagtatatcgagcgtatgggcatcgacaatgataccgaactgagcaaacaaattttccgtgtggataaaaacttctgtctgcgccctatgctagcaccaaatctggctaactatctgcgcaaactggaccgtgccctgcctgatcctatcaaaatcttcgagatcggcccgtgttatcgtaaagagtccgacggtaaagaacatctggaggagtttaccatgctgaacttttgccaaatgggttcaggttgtactcgtgagaacctggaaagcatcatcaccgattttctgaaccacctgggcattgacttcaaaattgtgggcgacagctgtatggtgtttggcgacaccctggatgtcatgcacggcgacctggaactgtctagtgccgttgtgggcccaatcccgctggatcgtgagtggggtatcgacaaaccttggatcggtgcgggttttggtctggagcgtctgctgaaagtaaaacacgacttcaagaacatcaaacgtgctgcacgttccgagtcctattacaatggtatttctactaacctgtaa

SEQ ID NO: 592 - protein, 1235 aa, Artificial Sequence
  Description of Artificial Sequence: Synthetic polypeptide
  TOM20::FUS::SYNZIP2::MCP::PylRS(AF)
MVGRNSAIAAGVCGALFIGYCIYFDRKRRSDPNFKNRLRERRKKQKLAKERAGLSKLPDLKDAEAVQKFFMASNDYTQQATQSYGAYPTQPGQGYSQQSSQPYGQQSYSGYSQSTDTSGYGQSSYSSYGQSQNTGYGTQSTPQGYGSTGGYGSSQSSQSSYGQQSSYPGYGQQPAPSSTSGSYGSSSQSSSYGQPQSGSYSQQPSYGGQQQSYGQQQSYNPPQGYGQQNQYNSSSGGGGGGGGGGNYGQDQSSMSSGGGSGGGYGNQDQSGGGGSGGYGQQDRGGRGRGGSGGGGGGGGGGYNRSSGGYEPRGRGGGRGGRGGMGGSDRGGFNKFGGPRDQGSRHDSEQDNSDNNTIFVQGLGENVTIESVADYFKQIGIIKTNKKTGQPMINLYTDRETGKLKGEATVSFDDPPSAKAAIDWFDGKEFSGNPIKVSFATRRADFNRGGGNGRGGRGRGGPMGRGGYGGGGSGGGGRGGFPSGGGGGGGQQRAGDWKCPNPTCENMNFSWRNECNQCKAPKPDGPGGGPGGSHMGGNYGDDRRGGRGGAIAARNAYLRKKIARLKKDNLQLERDEQNLEKIIANLRDEIARLENEVASHEQASIYPYDVPDYAGAPGSAGSAAGSGASNFTQFVLVDNGGTGDVTVAPSNFANGIAEWISSNSRSQAYKVTCSVRQSSAQNRKYTIKVEVPKGAWRSYLNMELTIPIFATNSDCELIVKAMQGLLKDGNPIPSAIAANSGIYGADYKDDDDKGAPGSAGSAAGSGACPVPLQLPPLERLTLDDKKPLNTLISATGLWMSRTGTIHKIKHHEVSRSKIYIEMACGDHLVVNNSRSSRTARALRHHKYRKTCKRCRVSDEDLNKFLTKANEDQTSVKVKVVSAPTRTKKAMPKSVARAPKPLENTEAAQAQPSGSKFSPAIPVSTQESVSVPASVSTSISSISTGATASALVKGNTNPITSMSAPVQASAPALTKSQTDRLEVLLNPKDEISLNSGKPFRELESELLSRRKKDLQQIYAEERENYLGKLEREITRFFVDRGFLEIKSPILIPLEYIERMGIDNDTELSKQIFRVDKNFCLRPMLAPNLANYLRKLDRALPDPIKIFEIGPCYRKESDGKEHLEEFTMLNFCQMGSGCTRENLESIITDFLNHLGIDFKIVGDSCMVFGDTLDVMHGDLELSSAVVGPIPLDREWGIDKPWIGAGFGLERLLKVKHDFKNIKRAARSESYYNGISTNL

SEQ ID NO: 593 - DNA, 3699 bp, Artificial Sequence
  Description of Artificial Sequence: Synthetic polynucleotide
  TOM20::FUS::SYNZIP1::MCP::PylRS(AA)
atggtgggtcggaacagcgccatcgccgccggtgtatgcggggcccttttcattgggtactgcatctacttcgaccgcaaaagacgaagtgaccccaacttcaagaacaggcttcgagaacgaagaaagaaacagaagcttgccaaggagagagctgggctttccaagttacctgaccttaaagatgctgaagctgttcagaaattcttcatggcctcaaacgattatacccaacaagcaacccaaagctatggggcctaccccacccagcccgggcagggctattcccagcagagcagtcagccctacggacagcagagttacagtggttatagccagtccacggacacttcaggatatggccagagcagctattcttcttatggccagagccagaacacaggctatggaactcagtcaactccccagggatatggctcgactggcggctatggcagtagccagagctcccaatcgtcttacgggcagcagtcctcctaccctggctatggccagcagccagctcccagcagcacctcgggaagttacggtagcagttctcagagcagcagctatgggcagccccagagtgggagctacagccagcagcctagctatggtggacagcagcaaagctatggacagcagcaaagctataatccccctcagggctatggacagcagaaccagtacaacagcagcagtggtggtggaggtggaggtggaggtggaggtaactatggccaagatcaatcctccatgagtagtggtggtggcagtggtggcggttatggcaatcaagaccagagtggtggaggtggcagcggtggctatggacagcaggaccgtggaggccgcggcaggggtggcagtggtggcggcggcggcggcggcggtggtggttacaaccgcagcagtggtggctatgaacccagaggtcgtggaggtggccgtggaggcagaggtggcatgggcggaagtgaccgtggtggcttcaataaatttggtggccctcgggaccaaggatcacgtcatgactccgaacaggataattcagacaacaacaccatctttgtgcaaggcctgggtgagaatgttacaattgagtctgtggctgattacttcaagcagattggtattattaagacaaacaagaaaacgggacagcccatgattaatttgtacacagacagggaaactggcaagctgaagggagaggcaacggtctcttttgatgacccaccttcagctaaagcagctattgactggtttgatggtaaagaattctccggaaatcctatcaaggtctcatttgctactcgccgggcagactttaatcggggtggtggcaatggtcgtggaggccgagggcgaggaggacccatgggccgtggaggctatggaggtggtggcagtggtggtggtggccgaggaggatttcccagtggaggtggtggcggtggaggacagcagcgagctggtgactggaagtgtcctaatcccacctgtgagaatatgaacttctcttggaggaatgaatgcaaccagtgtaaggcccctaaaccagatggcccaggagggggaccaggtggctctcacatggggggtaactacggggatgatcgtcgtggtggcagaggaggcgcgatcgcaaatctggtggcccagctggaaaacgaggtggccagcctggaaaacgagaacgaaaccctgaagaaaaagaacctgcacaagaaggacctgatcgcctacctggaaaaggaaatcgccaacctgagaaagaagatcgaggaagcatcgatatatccctatgatgtgccggattatgctggagcaccaggaagtgctggttctgctgctggtagtggagcttctaactttactcagttcgttctcgtcgacaatggcggaactggcgacgtgactgtcgccccaagcaacttcgctaacgggatcgctgaatggatcagctctaactcgcgttcacaggcttacaaagtaacctgtagcgttcgtcagagctctgcgcagaatcgcaaatacaccatcaaagtcgaggtgcctaaaggcgcctggcgttcgtacttaaatatggaactaaccattccaattttcgccacgaattccgactgcgagcttattgttaaggcaatgcaaggtctcctaaaagatggaaacccgattccctcagcaatcgcagcaaactccggcatctacggcgccgattacaaggacgatgatgacaagggagcaccaggaagtgctggttctgctgctggtagtggagcgtgcccggtgccgctgcagctgccgccgctggaacgcctgaccctggatgataaaaaaccgctgaataccctgatctctgctactggtctgtggatgagtcgtaccggaaccattcataaaatcaaacaccacgaggttagccgttcgaaaatctatattgagatggcgtgtggcgatcatctggttgtgaacaatagccgctcttctcgtacagcacgtgcactgcgtcaccacaaatatcgtaaaacctgtaaacgttgccgtgtgtccgatgaggatctgaacaaattcctgacaaaagccaatgaggaccaaacaagcgtgaaagtgaaagtcgttagcgctcctacccgtactaaaaaagcaatgccgaaatccgttgctcgtgcccctaaaccactggaaaacactgaagcagcacaggcacagccgtctggaagcaaattctctccggccattcctgtttctacccaggagtccgtttctgttccagcaagtgtgagcaccagcattagcagtattagcaccggtgccaccgctagcgccctggttaaaggcaataccaatccgattacaagcatgtctgccccggttcaagcatcagctccagcactgacaaaatcccaaaccgatcgtctggaggttctgctgaatccgaaagacgaaatcagcctgaattccggcaaaccgtttcgtgaactggagagcgaactgctgtcacgtcgtaaaaaagacctgcaacaaatctatgccgaagaacgtgagaactatctggggaaactggaacgtgaaatcacccgctttttcgtggatcgtggctttctggagatcaaatccccgattctgattcctctggagtatatcgagcgtatgggcatcgacaatgataccgaactgagcaaacaaattttccgtgtggataaaaacttctgtctgcgccctatgctggcaccaaatctgtataactatctgcgcaaactggaccgtgccctgcctgatcctatcaaaatcttcgagatcggcccgtgttatcgtaaagagtccgacggtaaagaacatctggaggagtttaccatgctggcctttgcccaaatgggttcaggttgtactcgtgagaacctggaaagcatcatcaccgattttctgaaccacctgggcattgacttcaaaattgtgggcgacagctgtatggtgtatggcgacaccctggatgtcatgcacggcgacctggaactgtctagtgccgttgttggaccaattccgctggaccgtgagtggggtatcgacaaaccgtggatcggagcaggattcggtctggaacgcctgctgaaagtgaaacacgacttcaaaaacatcaaacgtgccgcccgttctgaatcgtattataacgggatctctacgaacctgtaa

SEQ ID NO: 594 - protein, 1232 aa, Artificial Sequence
  Description of Artificial Sequence: Synthetic polypeptide
  TOM20::FUS::SYNZIP1::MCP::PylRS(AA)
MVGRNSAIAAGVCGALFIGYCIYFDRKRRSDPNFKNRLRERRKKQKLAKERAGLSKLPDLKDAEAVQKFFMASNDYTQQATQSYGAYPTQPGQGYSQQSSQPYGQQSYSGYSQSTDTSGYGQSSYSSYGQSQNTGYGTQSTPQGYGSTGGYGSSQSSQSSYGQQSSYPGYGQQPAPSSTSGSYGSSSQSSSYGQPQSGSYSQQPSYGGQQQSYGQQQSYNPPQGYGQQNQYNSSSGGGGGGGGGGNYGQDQSSMSSGGGSGGGYGNQDQSGGGGSGGYGQQDRGGRGRGGSGGGGGGGGGGYNRSSGGYEPRGRGGGRGGRGGMGGSDRGGFNKFGGPRDQGSRHDSEQDNSDNNTIFVQGLGENVTIESVADYFKQIGIIKTNKKTGQPMINLYTDRETGKLKGEATVSFDDPPSAKAAIDWFDGKEFSGNPIKVSFATRRADFNRGGGNGRGGRGRGGPMGRGGYGGGGSGGGGRGGFPSGGGGGGGQQRAGDWKCPNPTCENMNFSWRNECNQCKAPKPDGPGGGPGGSHMGGNYGDDRRGGRGGAIANLVAQLENEVASLENENETLKKKNLHKKDLIAYLEKEIANLRKKIEEASIYPYDVPDYAGAPGSAGSAAGSGASNFTQFVLVDNGGTGDVTVAPSNFANGIAEWISSNSRSQAYKVTCSVRQSSAQNRKYTIKVEVPKGAWRSYLNMELTIPIFATNSDCELIVKAMQGLLKDGNPIPSAIAANSGIYGADYKDDDDKGAPGSAGSAAGSGACPVPLQLPPLERLTLDDKKPLNTLISATGLWMSRTGTIHKIKHHEVSRSKIYIEMACGDHLVVNNSRSSRTARALRHHKYRKTCKRCRVSDEDLNKFLTKANEDQTSVKVKVVSAPTRTKKAMPKSVARAPKPLENTEAAQAQPSGSKFSPAIPVSTQESVSVPASVSTSISSISTGATASALVKGNTNPITSMSAPVQASAPALTKSQTDRLEVLLNPKDEISLNSGKPFRELESELLSRRKKDLQQIYAEERENYLGKLEREITRFFVDRGFLEIKSPILIPLEYIERMGIDNDTELSKQIFRVDKNFCLRPMLAPNLYNYLRKLDRALPDPIKIFEIGPCYRKESDGKEHLEEFTMLAFAQMGSGCTRENLESIITDFLNHLGIDFKIVGDSCMVYGDTLDVMHGDLELSSAVVGPIPLDREWGIDKPWIGAGFGLERLLKVKHDFKNIKRAARSESYYNGISTNL

SEQ ID NO: 595 - DNA, 3708 bp, Artificial Sequence
  Description of Artificial Sequence: Synthetic polynucleotide
  TOM20::FUS::SYNZIP2::MCP::PylRS(AA)
atggtgggtcggaacagcgccatcgccgccggtgtatgcggggcccttttcattgggtactgcatctacttcgaccgcaaaagacgaagtgaccccaacttcaagaacaggcttcgagaacgaagaaagaaacagaagcttgccaaggagagagctgggctttccaagttacctgaccttaaagatgctgaagctgttcagaaattcttcatggcctcaaacgattatacccaacaagcaacccaaagctatggggcctaccccacccagcccgggcagggctattcccagcagagcagtcagccctacggacagcagagttacagtggttatagccagtccacggacacttcaggatatggccagagcagctattcttcttatggccagagccagaacacaggctatggaactcagtcaactccccagggatatggctcgactggcggctatggcagtagccagagctcccaatcgtcttacgggcagcagtcctcctaccctggctatggccagcagccagctcccagcagcacctcgggaagttacggtagcagttctcagagcagcagctatgggcagccccagagtgggagctacagccagcagcctagctatggtggacagcagcaaagctatggacagcagcaaagctataatccccctcagggctatggacagcagaaccagtacaacagcagcagtggtggtggaggtggaggtggaggtggaggtaactatggccaagatcaatcctccatgagtagtggtggtggcagtggtggcggttatggcaatcaagaccagagtggtggaggtggcagcggtggctatggacagcaggaccgtggaggccgcggcaggggtggcagtggtggcggcggcggcggcggcggtggtggttacaaccgcagcagtggtggctatgaacccagaggtcgtggaggtggccgtggaggcagaggtggcatgggcggaagtgaccgtggtggcttcaataaatttggtggccctcgggaccaaggatcacgtcatgactccgaacaggataattcagacaacaacaccatctttgtgcaaggcctgggtgagaatgttacaattgagtctgtggctgattacttcaagcagattggtattattaagacaaacaagaaaacgggacagcccatgattaatttgtacacagacagggaaactggcaagctgaagggagaggcaacggtctcttttgatgacccaccttcagctaaagcagctattgactggtttgatggtaaagaattctccggaaatcctatcaaggtctcatttgctactcgccgggcagactttaatcggggtggtggcaatggtcgtggaggccgagggcgaggaggacccatgggccgtggaggctatggaggtggtggcagtggtggtggtggccgaggaggatttcccagtggaggtggtggcggtggaggacagcagcgagctggtgactggaagtgtcctaatcccacctgtgagaatatgaacttctcttggaggaatgaatgcaaccagtgtaaggcccctaaaccagatggcccaggagggggaccaggtggctctcacatggggggtaactacggggatgatcgtcgtggtggcagaggaggcgcgatcgcagctagaaacgcctacctgagaaagaaaatcgccagactgaagaaggacaacctgcagctggaaagagacgagcagaacctggaaaagatcatcgccaacctcagagatgagatcgccagactggaaaacgaggtggccagccacgagcaggcatcgatatatccctatgatgtgccggattatgctggagcaccaggaagtgctggttctgctgctggtagtggagcttctaactttactcagttcgttctcgtcgacaatggcggaactggcgacgtgactgtcgccccaagcaacttcgctaacgggatcgctgaatggatcagctctaactcgcgttcacaggcttacaaagtaacctgtagcgttcgtcagagctctgcgcagaatcgcaaatacaccatcaaagtcgaggtgcctaaaggcgcctggcgttcgtacttaaatatggaactaaccattccaattttcgccacgaattccgactgcgagcttattgttaaggcaatgcaaggtctcctaaaagatggaaacccgattccctcagcaatcgcagcaaactccggcatctacggcgccgattacaaggacgatgatgacaagggagcaccaggaagtgctggttctgctgctggtagtggagcgtgcccggtgccgctgcagctgccgccgctggaacgcctgaccctggatgataaaaaaccgctgaataccctgatctctgctactggtctgtggatgagtcgtaccggaaccattcataaaatcaaacaccacgaggttagccgttcgaaaatctatattgagatggcgtgtggcgatcatctggttgtgaacaatagccgctcttctcgtacagcacgtgcactgcgtcaccacaaatatcgtaaaacctgtaaacgttgccgtgtgtccgatgaggatctgaacaaattcctgacaaaagccaatgaggaccaaacaagcgtgaaagtgaaagtcgttagcgctcctacccgtactaaaaaagcaatgccgaaatccgttgctcgtgcccctaaaccactggaaaacactgaagcagcacaggcacagccgtctggaagcaaattctctccggccattcctgtttctacccaggagtccgtttctgttccagcaagtgtgagcaccagcattagcagtattagcaccggtgccaccgctagcgccctggttaaaggcaataccaatccgattacaagcatgtctgccccggttcaagcatcagctccagcactgacaaaatcccaaaccgatcgtctggaggttctgctgaatccgaaagacgaaatcagcctgaattccggcaaaccgtttcgtgaactggagagcgaactgctgtcacgtcgtaaaaaagacctgcaacaaatctatgccgaagaacgtgagaactatctggggaaactggaacgtgaaatcacccgctttttcgtggatcgtggctttctggagatcaaatccccgattctgattcctctggagtatatcgagcgtatgggcatcgacaatgataccgaactgagcaaacaaattttccgtgtggataaaaacttctgtctgcgccctatgctggcaccaaatctgtataactatctgcgcaaactggaccgtgccctgcctgatcctatcaaaatcttcgagatcggcccgtgttatcgtaaagagtccgacggtaaagaacatctggaggagtttaccatgctggcctttgcccaaatgggttcaggttgtactcgtgagaacctggaaagcatcatcaccgattttctgaaccacctgggcattgacttcaaaattgtgggcgacagctgtatggtgtatggcgacaccctggatgtcatgcacggcgacctggaactgtctagtgccgttgttggaccaattccgctggaccgtgagtggggtatcgacaaaccgtggatcggagcaggattcggtctggaacgcctgctgaaagtgaaacacgacttcaaaaacatcaaacgtgccgcccgttctgaatcgtattataacgggatctctacgaacctgtaa

SEQ ID NO: 596 - protein, 1235 aa, Artificial Sequence
  Description of Artificial Sequence: Synthetic polypeptide
  TOM20::FUS::SYNZIP2::MCP::PylRS(AA)
MVGRNSAIAAGVCGALFIGYCIYFDRKRRSDPNFKNRLRERRKKQKLAKERAGLSKLPDLKDAEAVQKFFMASNDYTQQATQSYGAYPTQPGQGYSQQSSQPYGQQSYSGYSQSTDTSGYGQSSYSSYGQSQNTGYGTQSTPQGYGSTGGYGSSQSSQSSYGQQSSYPGYGQQPAPSSTSGSYGSSSQSSSYGQPQSGSYSQQPSYGGQQQSYGQQQSYNPPQGYGQQNQYNSSSGGGGGGGGGGNYGQDQSSMSSGGGSGGGYGNQDQSGGGGSGGYGQQDRGGRGRGGSGGGGGGGGGGYNRSSGGYEPRGRGGGRGGRGGMGGSDRGGFNKFGGPRDQGSRHDSEQDNSDNNTIFVQGLGENVTIESVADYFKQIGIIKTNKKTGQPMINLYTDRETGKLKGEATVSFDDPPSAKAAIDWFDGKEFSGNPIKVSFATRRADFNRGGGNGRGGRGRGGPMGRGGYGGGGSGGGGRGGFPSGGGGGGGQQRAGDWKCPNPTCENMNFSWRNECNQCKAPKPDGPGGGPGGSHMGGNYGDDRRGGRGGAIAARNAYLRKKIARLKKDNLQLERDEQNLEKIIANLRDEIARLENEVASHEQASIYPYDVPDYAGAPGSAGSAAGSGASNFTQFVLVDNGGTGDVTVAPSNFANGIAEWISSNSRSQAYKVTCSVRQSSAQNRKYTIKVEVPKGAWRSYLNMELTIPIFATNSDCELIVKAMQGLLKDGNPIPSAIAANSGIYGADYKDDDDKGAPGSAGSAAGSGACPVPLQLPPLERLTLDDKKPLNTLISATGLWMSRTGTIHKIKHHEVSRSKIYIEMACGDHLVVNNSRSSRTARALRHHKYRKTCKRCRVSDEDLNKFLTKANEDQTSVKVKVVSAPTRTKKAMPKSVARAPKPLENTEAAQAQPSGSKFSPAIPVSTQESVSVPASVSTSISSISTGATASALVKGNTNPITSMSAPVQASAPALTKSQTDRLEVLLNPKDEISLNSGKPFRELESELLSRRKKDLQQIYAEERENYLGKLEREITRFFVDRGFLEIKSPILIPLEYIERMGIDNDTELSKQIFRVDKNFCLRPMLAPNLYNYLRKLDRALPDPIKIFEIGPCYRKESDGKEHLEEFTMLAFAQMGSGCTRENLESIITDFLNHLGIDFKIVGDSCMVYGDTLDVMHGDLELSSAVVGPIPLDREWGIDKPWIGAGFGLERLLKVKHDFKNIKRAARSESYYNGISTNL

SEQ ID NO: 597 - DNA, 3699 bp, Artificial Sequence
  Description of Artificial Sequence: Synthetic polynucleotide
  TOM20::FUS::SYNZIP::MCP::IFRS1
atggtgggtcggaacagcgccatcgccgccggtgtatgcggggcccttttcattgggtactgcatctacttcgaccgcaaaagacgaagtgaccccaacttcaagaacaggcttcgagaacgaagaaagaaacagaagcttgccaaggagagagctgggctttccaagttacctgaccttaaagatgctgaagctgttcagaaattcttcatggcctcaaacgattatacccaacaagcaacccaaagctatggggcctaccccacccagcccgggcagggctattcccagcagagcagtcagccctacggacagcagagttacagtggttatagccagtccacggacacttcaggatatggccagagcagctattcttcttatggccagagccagaacacaggctatggaactcagtcaactccccagggatatggctcgactggcggctatggcagtagccagagctcccaatcgtcttacgggcagcagtcctcctaccctggctatggccagcagccagctcccagcagcacctcgggaagttacggtagcagttctcagagcagcagctatgggcagccccagagtgggagctacagccagcagcctagctatggtggacagcagcaaagctatggacagcagcaaagctataatccccctcagggctatggacagcagaaccagtacaacagcagcagtggtggtggaggtggaggtggaggtggaggtaactatggccaagatcaatcctccatgagtagtggtggtggcagtggtggcggttatggcaatcaagaccagagtggtggaggtggcagcggtggctatggacagcaggaccgtggaggccgcggcaggggtggcagtggtggcggcggcggcggcggcggtggtggttacaaccgcagcagtggtggctatgaacccagaggtcgtggaggtggccgtggaggcagaggtggcatgggcggaagtgaccgtggtggcttcaataaatttggtggccctcgggaccaaggatcacgtcatgactccgaacaggataattcagacaacaacaccatctttgtgcaaggcctgggtgagaatgttacaattgagtctgtggctgattacttcaagcagattggtattattaagacaaacaagaaaacgggacagcccatgattaatttgtacacagacagggaaactggcaagctgaagggagaggcaacggtctcttttgatgacccaccttcagctaaagcagctattgactggtttgatggtaaagaattctccggaaatcctatcaaggtctcatttgctactcgccgggcagactttaatcggggtggtggcaatggtcgtggaggccgagggcgaggaggacccatgggccgtggaggctatggaggtggtggcagtggtggtggtggccgaggaggatttcccagtggaggtggtggcggtggaggacagcagcgagctggtgactggaagtgtcctaatcccacctgtgagaatatgaacttctcttggaggaatgaatgcaaccagtgtaaggcccctaaaccagatggcccaggagggggaccaggtggctctcacatggggggtaactacggggatgatcgtcgtggtggcagaggaggcgcgatcgcaaatctggtggcccagctggaaaacgaggtggccagcctggaaaacgagaacgaaaccctgaagaaaaagaacctgcacaagaaggacctgatcgcctacctggaaaaggaaatcgccaacctgagaaagaagatcgaggaagcatcgatatatccctatgatgtgccggattatgctggagcaccaggaagtgctggttctgctgctggtagtggagcttctaactttactcagttcgttctcgtcgacaatggcggaactggcgacgtgactgtcgccccaagcaacttcgctaacgggatcgctgaatggatcagctctaactcgcgttcacaggcttacaaagtaacctgtagcgttcgtcagagctctgcgcagaatcgcaaatacaccatcaaagtcgaggtgcctaaaggcgcctggcgttcgtacttaaatatggaactaaccattccaattttcgccacgaattccgactgcgagcttattgttaaggcaatgcaaggtctcctaaaagatggaaacccgattccctcagcaatcgcagcaaactccggcatctacggcgccgattacaaggacgatgatgacaagggagcaccaggaagtgctggttctgctgctggtagtggagcgtgcccggtgccgctgcagctgccgccgctggaacgcctgaccctggatgataaaaaaccgctgaataccctgatctctgctactggtctgtggatgagtcgtaccggaaccattcataaaatcaaacaccacgaggttagccgttcgaaaatctatattgagatggcgtgtggcgatcatctggttgtgaacaatagccgctcttctcgtacagcacgtgcactgcgtcaccacaaatatcgtaaaacctgtaaacgttgccgtgtgtccgatgaggatctgaacaaattcctgacaaaagccaatgaggaccaaacaagcgtgaaagtgaaagtcgttagcgctcctacccgtactaaaaaagcaatgccgaaatccgttgctcgtgcccctaaaccactggaaaacactgaagcagcacaggcacagccgtctggaagcaaattctctccggccattcctgtttctacccaggagtccgtttctgttccagcaagtgtgagcaccagcattagcagtattagcaccggtgccaccgctagcgccctggttaaaggcaataccaatccgattacaagcatgtctgccccggttcaagcatcagctccagcactgacaaaatcccaaaccgatcgtctggaggttctgctgaatccgaaagacgaaatcagcctgaattccggcaaaccgtttcgtgaactggagagcgaactgctgtcacgtcgtaaaaaagacctgcaacaaatctatgccgaagaacgtgagaactatctggggaaactggaacgtgaaatcacccgctttttcgtggatcgtggctttctggagatcaaatccccgattctgattcctctggagtatatcgagcgtatgggcatcgacaatgataccgaactgagcaaacaaattttccgtgtggataaaaacttctgtctgcgccctatgcttgcaccaaatatgctgaactatagccgcaaactggaccgtgccctgcctgatcctatcaaaatcttcgagatcggcccgtgttatcgtaaagagtccgacggtaaagaacatctggaggagtttaccatgctgtcttttatgcaaatgggttcaggttgtactcgtgagaacctggaaagcatcatcaccgattttctgaaccacctgggcattgacttcaaaattgtgggcgacagctgtatggtgtatggcgacaccctggatgtcatgcacggcgacctggaactgtctagtgccgttgttggaccaattccgctggaccgtgagtggggtatcgacaaaccgtggatcggagcaggattcggtctggaacgcctgctgaaagtgaaacacgacttcaaaaacatcaaacgtgccgcccgttctgaatcgtattataacgggatctctacgaacctgtaa

SEQ ID NO: 598 - protein, 1232 aa, Artificial Sequence
  Description of Artificial Sequence: Synthetic polypeptide
  TOM20::FUS::SYNZIP::MCP::IFRS1
MVGRNSAIAAGVCGALFIGYCIYFDRKRRSDPNFKNRLRERRKKQKLAKERAGLSKLPDLKDAEAVQKFFMASNDYTQQATQSYGAYPTQPGQGYSQQSSQPYGQQSYSGYSQSTDTSGYGQSSYSSYGQSQNTGYGTQSTPQGYGSTGGYGSSQSSQSSYGQQSSYPGYGQQPAPSSTSGSYGSSSQSSSYGQPQSGSYSQQPSYGGQQQSYGQQQSYNPPQGYGQQNQYNSSSGGGGGGGGGGNYGQDQSSMSSGGGSGGGYGNQDQSGGGGSGGYGQQDRGGRGRGGSGGGGGGGGGGYNRSSGGYEPRGRGGGRGGRGGMGGSDRGGFNKFGGPRDQGSRHDSEQDNSDNNTIFVQGLGENVTIESVADYFKQIGIIKTNKKTGQPMINLYTDRETGKLKGEATVSFDDPPSAKAAIDWFDGKEFSGNPIKVSFATRRADFNRGGGNGRGGRGRGGPMGRGGYGGGGSGGGGRGGFPSGGGGGGGQQRAGDWKCPNPTCENMNFSWRNECNQCKAPKPDGPGGGPGGSHMGGNYGDDRRGGRGGAIANLVAQLENEVASLENENETLKKKNLHKKDLIAYLEKEIANLRKKIEEASIYPYDVPDYAGAPGSAGSAAGSGASNFTQFVLVDNGGTGDVTVAPSNFANGIAEWISSNSRSQAYKVTCSVRQSSAQNRKYTIKVEVPKGAWRSYLNMELTIPIFATNSDCELIVKAMQGLLKDGNPIPSAIAANSGIYGADYKDDDDKGAPGSAGSAAGSGACPVPLQLPPLERLTLDDKKPLNTLISATGLWMSRTGTIHKIKHHEVSRSKIYIEMACGDHLVVNNSRSSRTARALRHHKYRKTCKRCRVSDEDLNKFLTKANEDQTSVKVKVVSAPTRTKKAMPKSVARAPKPLENTEAAQAQPSGSKFSPAIPVSTQESVSVPASVSTSISSISTGATASALVKGNTNPITSMSAPVQASAPALTKSQTDRLEVLLNPKDEISLNSGKPFRELESELLSRRKKDLQQIYAEERENYLGKLEREITRFFVDRGFLEIKSPILIPLEYIERMGIDNDTELSKQIFRVDKNFCLRPMLAPNMLNYSRKLDRALPDPIKIFEIGPCYRKESDGKEHLEEFTMLSFMQMGSGCTRENLESIITDFLNHLGIDFKIVGDSCMVYGDTLDVMHGDLELSSAVVGPIPLDREWGIDKPWIGAGFGLERLLKVKHDFKNIKRAARSESYYNGISTNL

SEQ ID NO: 599 - DNA, 3708 bp, Artificial Sequence
  Description of Artificial Sequence: Synthetic polynucleotide
  TOM20::FUS::SYNZIP2::MCP::IFRS1
atggtgggtcggaacagcgccatcgccgccggtgtatgcggggcccttttcattgggtactgcatctacttcgaccgcaaaagacgaagtgaccccaacttcaagaacaggcttcgagaacgaagaaagaaacagaagcttgccaaggagagagctgggctttccaagttacctgaccttaaagatgctgaagctgttcagaaattcttcatggcctcaaacgattatacccaacaagcaacccaaagctatggggcctaccccacccagcccgggcagggctattcccagcagagcagtcagccctacggacagcagagttacagtggttatagccagtccacggacacttcaggatatggccagagcagctattcttcttatggccagagccagaacacaggctatggaactcagtcaactccccagggatatggctcgactggcggctatggcagtagccagagctcccaatcgtcttacgggcagcagtcctcctaccctggctatggccagcagccagctcccagcagcacctcgggaagttacggtagcagttctcagagcagcagctatgggcagccccagagtgggagctacagccagcagcctagctatggtggacagcagcaaagctatggacagcagcaaagctataatccccctcagggctatggacagcagaaccagtacaacagcagcagtggtggtggaggtggaggtggaggtggaggtaactatggccaagatcaatcctccatgagtagtggtggtggcagtggtggcggttatggcaatcaagaccagagtggtggaggtggcagcggtggctatggacagcaggaccgtggaggccgcggcaggggtggcagtggtggcggcggcggcggcggcggtggtggttacaaccgcagcagtggtggctatgaacccagaggtcgtggaggtggccgtggaggcagaggtggcatgggcggaagtgaccgtggtggcttcaataaatttggtggccctcgggaccaaggatcacgtcatgactccgaacaggataattcagacaacaacaccatctttgtgcaaggcctgggtgagaatgttacaattgagtctgtggctgattacttcaagcagattggtattattaagacaaacaagaaaacgggacagcccatgattaatttgtacacagacagggaaactggcaagctgaagggagaggcaacggtctcttttgatgacccaccttcagctaaagcagctattgactggtttgatggtaaagaattctccggaaatcctatcaaggtctcatttgctactcgccgggcagactttaatcggggtggtggcaatggtcgtggaggccgagggcgaggaggacccatgggccgtggaggctatggaggtggtggcagtggtggtggtggccgaggaggatttcccagtggaggtggtggcggtggaggacagcagcgagctggtgactggaagtgtcctaatcccacctgtgagaatatgaacttctcttggaggaatgaatgcaaccagtgtaaggcccctaaaccagatggcccaggagggggaccaggtggctctcacatggggggtaactacggggatgatcgtcgtggtggcagaggaggcgcgatcgcagctagaaacgcctacctgagaaagaaaatcgccagactgaagaaggacaacctgcagctggaaagagacgagcagaacctggaaaagatcatcgccaacctcagagatgagatcgccagactggaaaacgaggtggccagccacgagcaggcatcgatatatccctatgatgtgccggattatgctggagcaccaggaagtgctggttctgctgctggtagtggagcttctaactttactcagttcgttctcgtcgacaatggcggaactggcgacgtgactgtcgccccaagcaacttcgctaacgggatcgctgaatggatcagctctaactcgcgttcacaggcttacaaagtaacctgtagcgttcgtcagagctctgcgcagaatcgcaaatacaccatcaaagtcgaggtgcctaaaggcgcctggcgttcgtacttaaatatggaactaaccattccaattttcgccacgaattccgactgcgagcttattgttaaggcaatgcaaggtctcctaaaagatggaaacccgattccctcagcaatcgcagcaaactccggcatctacggcgccgattacaaggacgatgatgacaagggagcaccaggaagtgctggttctgctgctggtagtggagcgtgcccggtgccgctgcagctgccgccgctggaacgcctgaccctggatgataaaaaaccgctgaataccctgatctctgctactggtctgtggatgagtcgtaccggaaccattcataaaatcaaacaccacgaggttagccgttcgaaaatctatattgagatggcgtgtggcgatcatctggttgtgaacaatagccgctcttctcgtacagcacgtgcactgcgtcaccacaaatatcgtaaaacctgtaaacgttgccgtgtgtccgatgaggatctgaacaaattcctgacaaaagccaatgaggaccaaacaagcgtgaaagtgaaagtcgttagcgctcctacccgtactaaaaaagcaatgccgaaatccgttgctcgtgcccctaaaccactggaaaacactgaagcagcacaggcacagccgtctggaagcaaattctctccggccattcctgtttctacccaggagtccgtttctgttccagcaagtgtgagcaccagcattagcagtattagcaccggtgccaccgctagcgccctggttaaaggcaataccaatccgattacaagcatgtctgccccggttcaagcatcagctccagcactgacaaaatcccaaaccgatcgtctggaggttctgctgaatccgaaagacgaaatcagcctgaattccggcaaaccgtttcgtgaactggagagcgaactgctgtcacgtcgtaaaaaagacctgcaacaaatctatgccgaagaacgtgagaactatctggggaaactggaacgtgaaatcacccgctttttcgtggatcgtggctttctggagatcaaatccccgattctgattcctctggagtatatcgagcgtatgggcatcgacaatgataccgaactgagcaaacaaattttccgtgtggataaaaacttctgtctgcgccctatgcttgcaccaaatatgctgaactatagccgcaaactggaccgtgccctgcctgatcctatcaaaatcttcgagatcggcccgtgttatcgtaaagagtccgacggtaaagaacatctggaggagtttaccatgctgtcttttatgcaaatgggttcaggttgtactcgtgagaacctggaaagcatcatcaccgattttctgaaccacctgggcattgacttcaaaattgtgggcgacagctgtatggtgtatggcgacaccctggatgtcatgcacggcgacctggaactgtctagtgccgttgttggaccaattccgctggaccgtgagtggggtatcgacaaaccgtggatcggagcaggattcggtctggaacgcctgctgaaagtgaaacacgacttcaaaaacatcaaacgtgccgcccgttctgaatcgtattataacgggatctctacgaacctgtaa

SEQ ID NO: 600 - protein, 1235 aa, Artificial Sequence
  Description of Artificial Sequence: Synthetic polypeptide
  TOM20::FUS::SYNZIP2::MCP::IFRS1
MVGRNSAIAAGVCGALFIGYCIYFDRKRRSDPNFKNRLRERRKKQKLAKERAGLSKLPDLKDAEAVQKFFMASNDYTQQATQSYGAYPTQPGQGYSQQSSQPYGQQSYSGYSQSTDTSGYGQSSYSSYGQSQNTGYGTQSTPQGYGSTGGYGSSQSSQSSYGQQSSYPGYGQQPAPSSTSGSYGSSSQSSSYGQPQSGSYSQQPSYGGQQQSYGQQQSYNPPQGYGQQNQYNSSSGGGGGGGGGGNYGQDQSSMSSGGGSGGGYGNQDQSGGGGSGGYGQQDRGGRGRGGSGGGGGGGGGGYNRSSGGYEPRGRGGGRGGRGGMGGSDRGGFNKFGGPRDQGSRHDSEQDNSDNNTIFVQGLGENVTIESVADYFKQIGIIKTNKKTGQPMINLYTDRETGKLKGEATVSFDDPPSAKAAIDWFDGKEFSGNPIKVSFATRRADFNRGGGNGRGGRGRGGPMGRGGYGGGGSGGGGRGGFPSGGGGGGGQQRAGDWKCPNPTCENMNFSWRNECNQCKAPKPDGPGGGPGGSHMGGNYGDDRRGGRGGAIAARNAYLRKKIARLKKDNLQLERDEQNLEKIIANLRDEIARLENEVASHEQASIYPYDVPDYAGAPGSAGSAAGSGASNFTQFVLVDNGGTGDVTVAPSNFANGIAEWISSNSRSQAYKVTCSVRQSSAQNRKYTIKVEVPKGAWRSYLNMELTIPIFATNSDCELIVKAMQGLLKDGNPIPSAIAANSGIYGADYKDDDDKGAPGSAGSAAGSGACPVPLQLPPLERLTLDDKKPLNTLISATGLWMSRTGTIHKIKHHEVSRSKIYIEMACGDHLVVNNSRSSRTARALRHHKYRKTCKRCRVSDEDLNKFLTKANEDQTSVKVKVVSAPTRTKKAMPKSVARAPKPLENTEAAQAQPSGSKFSPAIPVSTQESVSVPASVSTSISSISTGATASALVKGNTNPITSMSAPVQASAPALTKSQTDRLEVLLNPKDEISLNSGKPFRELESELLSRRKKDLQQIYAEERENYLGKLEREITRFFVDRGFLEIKSPILIPLEYIERMGIDNDTELSKQIFRVDKNFCLRPMLAPNMLNYSRKLDRALPDPIKIFEIGPCYRKESDGKEHLEEFTMLSFMQMGSGCTRENLESIITDFLNHLGIDFKIVGDSCMVYGDTLDVMHGDLELSSAVVGPIPLDREWGIDKPWIGAGFGLERLLKVKHDFKNIKRAARSESYYNGISTNL

SEQ ID NO: 601 - DNA, 3798 bp, Artificial Sequence
  Description of Artificial Sequence: Synthetic polynucleotide
  TOM20::FUS::SYNZIP3::4xlambdaN22::CbzRS
atggtgggtcggaacagcgccatcgccgccggtgtatgcggggcccttttcattgggtactgcatctacttcgaccgcaaaagacgaagtgaccccaacttcaagaacaggcttcgagaacgaagaaagaaacagaagcttgccaaggagagagctgggctttccaagttacctgaccttaaagatgctgaagctgttcagaaattcttcatggcctcaaacgattatacccaacaagcaacccaaagctatggggcctaccccacccagcccgggcagggctattcccagcagagcagtcagccctacggacagcagagttacagtggttatagccagtccacggacacttcaggatatggccagagcagctattcttcttatggccagagccagaacacaggctatggaactcagtcaactccccagggatatggctcgactggcggctatggcagtagccagagctcccaatcgtcttacgggcagcagtcctcctaccctggctatggccagcagccagctcccagcagcacctcgggaagttacggtagcagttctcagagcagcagctatgggcagccccagagtgggagctacagccagcagcctagctatggtggacagcagcaaagctatggacagcagcaaagctataatccccctcagggctatggacagcagaaccagtacaacagcagcagtggtggtggaggtggaggtggaggtggaggtaactatggccaagatcaatcctccatgagtagtggtggtggcagtggtggcggttatggcaatcaagaccagagtggtggaggtggcagcggtggctatggacagcaggaccgtggaggccgcggcaggggtggcagtggtggcggcggcggcggcggcggtggtggttacaaccgcagcagtggtggctatgaacccagaggtcgtggaggtggccgtggaggcagaggtggcatgggcggaagtgaccgtggtggcttcaataaatttggtggccctcgggaccaaggatcacgtcatgactccgaacaggataattcagacaacaacaccatctttgtgcaaggcctgggtgagaatgttacaattgagtctgtggctgattacttcaagcagattggtattattaagacaaacaagaaaacgggacagcccatgattaatttgtacacagacagggaaactggcaagctgaagggagaggcaacggtctcttttgatgacccaccttcagctaaagcagctattgactggtttgatggtaaagaattctccggaaatcctatcaaggtctcatttgctactcgccgggcagactttaatcggggtggtggcaatggtcgtggaggccgagggcgaggaggacccatgggccgtggaggctatggaggtggtggcagtggtggtggtggccgaggaggatttcccagtggaggtggtggcggtggaggacagcagcgagctggtgactggaagtgtcctaatcccacctgtgagaatatgaacttctcttggaggaatgaatgcaaccagtgtaaggcccctaaaccagatggcccaggagggggaccaggtggctctcacatggggggtaactacggggatgatcgtcgtggtggcagaggaggcgcgatcgcaaatgaggtgaccaccctggaaaacgacgccgccttcatcgagaacgagaacgcctacctggaaaaagagatcgccagactgagaaaggaaaaggccgctctgcggaacagactggcccacaagaagggagcaccaggaagtgctggttctgctgctggtagtggagcatcgatagagcagaagctgatctcagaggaggacctgctagccaccatggacgcacaaacacgacgacgtgagcgtcgcgctgagaaacaagctcaatggaaagctgcaaacccaccgctcgacggagccggagctggcgctggagctggagccggagctggcggtctagccaccatggacgcacaaacacgacgacgtgagcgtcgcgctgagaaacaagctcaatggaaagctgcaaacccaccgctcgacggagccggagctggcgctggagctggagccggagctggcggtctagccaccatggacgcacaaacacgacgacgtgagcgtcgcgctgagaaacaagctcaatggaaagctgcaaacccaccgctcgacggagccggagctggcgctggagctggagccggagctggcggtctagccaccatggacgcacaaacacgacgacgtgagcgtcgcgctgagaaacaagctcaatggaaagctgcaaacccaccgctcgagtctagagggcccgttggtgctcctggttcagcaggaagcgcagcaggatcaggtgcgtgcccggtgccgctgcagctgccgccgctggaacgcctgaccctggatgacaaaaaaccgctgaataccctgatctctgctactggtctgtggatgagtcgtaccggaaccattcataaaatcaaacaccacgaggttagccgttcgaaaatctatattgagatggcgtgtggcgatcatctggttgtgaacaatagccgctcttctcgtacagcacgtgcactgcgtcaccacaaatatcgtaaaacctgtaaacgttgccgtgtgtccgatgaggatctgaacaaattcctgacaaaagccaatgaggaccaaacaagcgtgaaagtgaaagtcgttagcgctcctacccgtactaaaaaagcaatgccgaaatccgttgctcgtgcccctaaaccactggaaaacactgaagcagcacaggcacagccgtctggaagcaaattctctccggccattcctgtttctacccaggagtccgtttctgttccagcaagtgtgagcaccagcattagcagtattagcaccggtgccaccgctagcgccctggttaaaggcaataccaatccgattacaagcatgtctgccccggttcaagcatcagctccagcactgacaaaatcccaaaccgatcgtctggaggttctgctgaatccgaaagacgaaatcagcctgaattccggcaaaccgtttcgtgaactggagagcgaactgctgtcacgtcgtaaaaaagacctgcaacaaatctatgccgaagaacgtgagaactatctggggaaactggaacgtgaaatcacccgctttttcgtggatcgtggctttctggagatcaaatccccgattctgattcctctggagtatatcgagcgtatgggcatcgacaatgataccgaactgagcaaacaaattttccgtgtggataaaaacttctgtctgcgccctatgcttgcaccaaatctgatgaactatggacgcaaactggaccgtgccctgcctgatcctatcaaaatcttcgagatcggcccgtgttatcgtaaagagtccgacggtaaagaacatctggaggagtttaccatgctgaactttacacaaatgggttcaggttgtactcgtgagaacctggaaagcatcatcaccgattttctgaaccacctgggcattgacttcaaaattgtgggcgacagctgtatggtgtatggcgacaccctggatgtcatgcacggcgacctggaactgtctagtgccgttgttggaccaattccgctggaccgtgagtggggtatcgacaaaccgtggatcggagcaggattcggtctggaacgcctgctgaaagtgaaacacgacttcaaaaacatcaaacgtgccgcccgttctgaatcgtattataacgggatctctacgaacctgtaa

SEQ ID NO: 602 - protein, 1265 aa, Artificial Sequence
  Description of Artificial Sequence: Synthetic polypeptide
  TOM20::FUS::SYNZIP3::4xlambdaN22::CbzRS
MVGRNSAIAAGVCGALFIGYCIYFDRKRRSDPNFKNRLRERRKKQKLAKERAGLSKLPDLKDAEAVQKFFMASNDYTQQATQSYGAYPTQPGQGYSQQSSQPYGQQSYSGYSQSTDTSGYGQSSYSSYGQSQNTGYGTQSTPQGYGSTGGYGSSQSSQSSYGQQSSYPGYGQQPAPSSTSGSYGSSSQSSSYGQPQSGSYSQQPSYGGQQQSYGQQQSYNPPQGYGQQNQYNSSSGGGGGGGGGGNYGQDQSSMSSGGGSGGGYGNQDQSGGGGSGGYGQQDRGGRGRGGSGGGGGGGGGGYNRSSGGYEPRGRGGGRGGRGGMGGSDRGGFNKFGGPRDQGSRHDSEQDNSDNNTIFVQGLGENVTIESVADYFKQIGIIKTNKKTGQPMINLYTDRETGKLKGEATVSFDDPPSAKAAIDWFDGKEFSGNPIKVSFATRRADFNRGGGNGRGGRGRGGPMGRGGYGGGGSGGGGRGGFPSGGGGGGGQQRAGDWKCPNPTCENMNFSWRNECNQCKAPKPDGPGGGPGGSHMGGNYGDDRRGGRGGAIANEVTTLENDAAFIENENAYLEKEIARLRKEKAALRNRLAHKKGAPGSAGSAAGSGASIEQKLISEEDLLATMDAQTRRRERRAEKQAQWKAANPPLDGAGAGAGAGAGAGGLATMDAQTRRRERRAEKQAQWKAANPPLDGAGAGAGAGAGAGGLATMDAQTRRRERRAEKQAQWKAANPPLDGAGAGAGAGAGAGGLATMDAQTRRRERRAEKQAQWKAANPPLESRGPVGAPGSAGSAAGSGACPVPLQLPPLERLTLDDKKPLNTLISATGLWMSRTGTIHKIKHHEVSRSKIYIEMACGDHLVVNNSRSSRTARALRHHKYRKTCKRCRVSDEDLNKFLTKANEDQTSVKVKVVSAPTRTKKAMPKSVARAPKPLENTEAAQAQPSGSKFSPAIPVSTQESVSVPASVSTSISSISTGATASALVKGNTNPITSMSAPVQASAPALTKSQTDRLEVLLNPKDEISLNSGKPFRELESELLSRRKKDLQQIYAEERENYLGKLEREITRFFVDRGFLEIKSPILIPLEYIERMGIDNDTELSKQIFRVDKNFCLRPMLAPNLMNYGRKLDRALPDPIKIFEIGPCYRKESDGKEHLEEFTMLNFTQMGSGCTRENLESIITDFLNHLGIDFKIVGDSCMVYGDTLDVMHGDLELSSAVVGPIPLDREWGIDKPWIGAGFGLERLLKVKHDFKNIKRAARSESYYNGISTNL

SEQ ID NO: 603 - DNA, 3627 bp, Artificial Sequence
  Description of Artificial Sequence: Synthetic polynucleotide
  EBAG91-29::FUS::SYNZIP3::PCP::PylRS(AF)
atggccatcacccagtttcggttatttaaattttgtacctgcctagcaacagtattctcattcctaaagagattaatatgcagatctggagcacccggctccgccggctccgccgccggctccggcatggcctcaaacgattatacccaacaagcaacccaaagctatggggcctaccccacccagcccgggcagggctattcccagcagagcagtcagccctacggacagcagagttacagtggttatagccagtccacggacacttcaggatatggccagagcagctattcttcttatggccagagccagaacacaggctatggaactcagtcaactccccagggatatggctcgactggcggctatggcagtagccagagctcccaatcgtcttacgggcagcagtcctcctaccctggctatggccagcagccagctcccagcagcacctcgggaagttacggtagcagttctcagagcagcagctatgggcagccccagagtgggagctacagccagcagcctagctatggtggacagcagcaaagctatggacagcagcaaagctataatccccctcagggctatggacagcagaaccagtacaacagcagcagtggtggtggaggtggaggtggaggtggaggtaactatggccaagatcaatcctccatgagtagtggtggtggcagtggtggcggttatggcaatcaagaccagagtggtggaggtggcagcggtggctatggacagcaggaccgtggaggccgcggcaggggtggcagtggtggcggcggcggcggcggcggtggtggttacaaccgcagcagtggtggctatgaacccagaggtcgtggaggtggccgtggaggcagaggtggcatgggcggaagtgaccgtggtggcttcaataaatttggtggccctcgggaccaaggatcacgtcatgactccgaacaggataattcagacaacaacaccatctttgtgcaaggcctgggtgagaatgttacaattgagtctgtggctgattacttcaagcagattggtattattaagacaaacaagaaaacgggacagcccatgattaatttgtacacagacagggaaactggcaagctgaagggagaggcaacggtctcttttgatgacccaccttcagctaaagcagctattgactggtttgatggtaaagaattctccggaaatcctatcaaggtctcatttgctactcgccgggcagactttaatcggggtggtggcaatggtcgtggaggccgagggcgaggaggacccatgggccgtggaggctatggaggtggtggcagtggtggtggtggccgaggaggatttcccagtggaggtggtggcggtggaggacagcagcgagctggtgactggaagtgtcctaatcccacctgtgagaatatgaacttctcttggaggaatgaatgcaaccagtgtaaggcccctaaaccagatggcccaggagggggaccaggtggctctcacatggggggtaactacggggatgatcgtcgtggtggcagaggtggtgcgatcgcaaatgaggtgaccaccctggaaaacgacgccgccttcatcgagaacgagaacgcctacctggaaaaagagatcgccagactgagaaaggaaaaggccgctctgcggaacagactggcccacaagaagggagcaccaggaagtgctggttctgctgctggtagtggagcatcgatagagcagaagctgatctcagaggaggacctgatcgaaggccgccatatgctagcctccaaaaccatcgttctttcggtcggcgaggctactcgcactctgactgagatccagtccaccgcagaccgtcagatcttcgaagagaaggtcgggcctctggtgggtcggctgcgcctcacggcttcgctccgtcaaaacggagccaagaccgcgtatcgcgtcaacctaaaactggatcaggcggacgtcgttgattccggacttccgaaagtgcgctacactcaggtatggtcgcacgacgtgacaatcgttgcgaatagcaccgaggcctcgcgcaaatcgttgtacgatttgaccaagtccctcgtcgcgacctcgcaggtcgaagatcttgtcgtcaaccttgtgccgctgggccgtgcggatccgctagccggtgctcctggttcagcaggaagcgcagcaggatcaggtgcgtgcccggtgccgctgcagctgccgccgctggaacgcctgaccctggatgataaaaaaccgctgaataccctgatctctgctactggtctgtggatgagtcgtaccggaaccattcataaaatcaaacaccacgaggttagccgttcgaaaatctatattgagatggcgtgtggcgatcatctggttgtgaacaatagccgctcttctcgtacagcacgtgcactgcgtcaccacaaatatcgtaaaacctgtaaacgttgccgtgtgtccgatgaggatctgaacaaattcctgacaaaagccaatgaggaccaaacaagcgtgaaagtgaaagtcgttagcgctcctacccgtactaaaaaagcaatgccgaaatccgttgctcgtgcccctaaaccactggaaaacactgaagcagcacaggcacagccgtctggaagcaaattctctccggccattcctgtttctacccaggagtccgtttctgttccagcaagtgtgagcaccagcattagcagtattagcaccggtgccaccgctagcgccctggttaaaggcaataccaatccgattacaagcatgtctgccccggttcaagcatcagctccagcactgacaaaatcccaaaccgatcgtctggaggttctgctgaatccgaaagacgaaatcagcctgaattccggcaaaccgtttcgtgaactggagagcgaactgctgtcacgtcgtaaaaaagacctgcaacaaatctatgccgaagaacgtgagaactatctggggaaactggaacgtgaaatcacccgctttttcgtggatcgtggctttctggagatcaaatccccgattctgattcctctggagtatatcgagcgtatgggcatcgacaatgataccgaactgagcaaacaaattttccgtgtggataaaaacttctgtctgcgccctatgctagcaccaaatctggctaactatctgcgcaaactggaccgtgccctgcctgatcctatcaaaatcttcgagatcggcccgtgttatcgtaaagagtccgacggtaaagaacatctggaggagtttaccatgctgaacttttgccaaatgggttcaggttgtactcgtgagaacctggaaagcatcatcaccgattttctgaaccacctgggcattgacttcaaaattgtgggcgacagctgtatggtgtttggcgacaccctggatgtcatgcacggcgacctggaactgtctagtgccgttgtgggcccaatcccgctggatcgtgagtggggtatcgacaaaccttggatcggtgcgggttttggtctggagcgtctgctgaaagtaaaacacgacttcaagaacatcaaacgtgctgcacgttccgagtcctattacaatggtatttctactaacctttaa

SEQ ID NO: 604 - protein, 1208 aa, Artificial Sequence
  Description of Artificial Sequence: Synthetic polypeptide
  EBAG91-29::FUS::SYNZIP3::PCP::PylRS(AF)
MAITQFRLFKFCTCLATVFSFLKRLICRSGAPGSAGSAAGSGMASNDYTQQATQSYGAYPTQPGQGYSQQSSQPYGQQSYSGYSQSTDTSGYGQSSYSSYGQSQNTGYGTQSTPQGYGSTGGYGSSQSSQSSYGQQSSYPGYGQQPAPSSTSGSYGSSSQSSSYGQPQSGSYSQQPSYGGQQQSYGQQQSYNPPQGYGQQNQYNSSSGGGGGGGGGGNYGQDQSSMSSGGGSGGGYGNQDQSGGGGSGGYGQQDRGGRGRGGSGGGGGGGGGGYNRSSGGYEPRGRGGGRGGRGGMGGSDRGGFNKFGGPRDQGSRHDSEQDNSDNNTIFVQGLGENVTIESVADYFKQIGIIKTNKKTGQPMINLYTDRETGKLKGEATVSFDDPPSAKAAIDWFDGKEFSGNPIKVSFATRRADFNRGGGNGRGGRGRGGPMGRGGYGGGGSGGGGRGGFPSGGGGGGGQQRAGDWKCPNPTCENMNFSWRNECNQCKAPKPDGPGGGPGGSHMGGNYGDDRRGGRGGAIANEVTTLENDAAFIENENAYLEKEIARLRKEKAALRNRLAHKKGAPGSAGSAAGSGASIEQKLISEEDLIEGRHMLASKTIVLSVGEATRTLTEIQSTADRQIFEEKVGPLVGRLRLTASLRQNGAKTAYRVNLKLDQADVVDSGLPKVRYTQVWSHDVTIVANSTEASRKSLYDLTKSLVATSQVEDLVVNLVPLGRADPLAGAPGSAGSAAGSGACPVPLQLPPLERLTLDDKKPLNTLISATGLWMSRTGTIHKIKHHEVSRSKIYIEMACGDHLVVNNSRSSRTARALRHHKYRKTCKRCRVSDEDLNKFLTKANEDQTSVKVKVVSAPTRTKKAMPKSVARAPKPLENTEAAQAQPSGSKFSPAIPVSTQESVSVPASVSTSISSISTGATASALVKGNTNPITSMSAPVQASAPALTKSQTDRLEVLLNPKDEISLNSGKPFRELESELLSRRKKDLQQIYAEERENYLGKLEREITRFFVDRGFLEIKSPILIPLEYIERMGIDNDTELSKQIFRVDKNFCLRPMLAPNLANYLRKLDRALPDPIKIFEIGPCYRKESDGKEHLEEFTMLNFCQMGSGCTRENLESIITDFLNHLGIDFKIVGDSCMVFGDTLDVMHGDLELSSAVVGPIPLDREWGIDKPWIGAGFGLERLLKVKHDFKNIKRAARSESYYNGISTNL

SEQ ID NO: 605 - DNA, 3672 bp, Artificial Sequence
  Description of Artificial Sequence: Synthetic polynucleotide
  EBAG91-29::FUS::SYNZIP4::PylRS(AF)
atggccatcacccagtttcggttatttaaattttgtacctgcctagcaacagtattctcattcctaaagagattaatatgcagatctggagcacccggctccgccggctccgccgccggctccggcatggcctcaaacgattatacccaacaagcaacccaaagctatggggcctaccccacccagcccgggcagggctattcccagcagagcagtcagccctacggacagcagagttacagtggttatagccagtccacggacacttcaggatatggccagagcagctattcttcttatggccagagccagaacacaggctatggaactcagtcaactccccagggatatggctcgactggcggctatggcagtagccagagctcccaatcgtcttacgggcagcagtcctcctaccctggctatggccagcagccagctcccagcagcacctcgggaagttacggtagcagttctcagagcagcagctatgggcagccccagagtgggagctacagccagcagcctagctatggtggacagcagcaaagctatggacagcagcaaagctataatccccctcagggctatggacagcagaaccagtacaacagcagcagtggtggtggaggtggaggtggaggtggaggtaactatggccaagatcaatcctccatgagtagtggtggtggcagtggtggcggttatggcaatcaagaccagagtggtggaggtggcagcggtggctatggacagcaggaccgtggaggccgcggcaggggtggcagtggtggcggcggcggcggcggcggtggtggttacaaccgcagcagtggtggctatgaacccagaggtcgtggaggtggccgtggaggcagaggtggcatgggcggaagtgaccgtggtggcttcaataaatttggtggccctcgggaccaaggatcacgtcatgactccgaacaggataattcagacaacaacaccatctttgtgcaaggcctgggtgagaatgttacaattgagtctgtggctgattacttcaagcagattggtattattaagacaaacaagaaaacgggacagcccatgattaatttgtacacagacagggaaactggcaagctgaagggagaggcaacggtctcttttgatgacccaccttcagctaaagcagctattgactggtttgatggtaaagaattctccggaaatcctatcaaggtctcatttgctactcgccgggcagactttaatcggggtggtggcaatggtcgtggaggccgagggcgaggaggacccatgggccgtggaggctatggaggtggtggcagtggtggtggtggccgaggaggatttcccagtggaggtggtggcggtggaggacagcagcgagctggtgactggaagtgtcctaatcccacctgtgagaatatgaacttctcttggaggaatgaatgcaaccagtgtaaggcccctaaaccagatggcccaggagggggaccaggtggctctcacatggggggtaactacggggatgatcgtcgtggtggcagaggtggtgcgatcgcacaaaaggtggctgaactgaaaaatagagtggccgtgaagctgaaccggaacgagcagctgaagaacaaggtggaagagctgaagaacagaaacgcctacctgaagaatgagctggccaccctggaaaacgaggtggccagactggaaaacgacgtggccgagttaatcgcaggagcaccaggaagtgctggttctgctgctggtagtggagcatcgatagagcagaagctgatctcagaggaggacctgatcgaaggccgccatatgctagcctccaaaaccatcgttctttcggtcggcgaggctactcgcactctgactgagatccagtccaccgcagaccgtcagatcttcgaagagaaggtcgggcctctggtgggtcggctgcgcctcacggcttcgctccgtcaaaacggagccaagaccgcgtatcgcgtcaacctaaaactggatcaggcggacgtcgttgattccggacttccgaaagtgcgctacactcaggtatggtcgcacgacgtgacaatcgttgcgaatagcaccgaggcctcgcgcaaatcgttgtacgatttgaccaagtccctcgtcgcgacctcgcaggtcgaagatcttgtcgtcaaccttgtgccgctgggccgtgcggatccgctagccggtgctcctggttcagcaggaagcgcagcaggatcaggtgcgtgcccggtgccgctgcagctgccgccgctggaacgcctgaccctggatgataaaaaaccgctgaataccctgatctctgctactggtctgtggatgagtcgtaccggaaccattcataaaatcaaacaccacgaggttagccgttcgaaaatctatattgagatggcgtgtggcgatcatctggttgtgaacaatagccgctcttctcgtacagcacgtgcactgcgtcaccacaaatatcgtaaaacctgtaaacgttgccgtgtgtccgatgaggatctgaacaaattcctgacaaaagccaatgaggaccaaacaagcgtgaaagtgaaagtcgttagcgctcctacccgtactaaaaaagcaatgccgaaatccgttgctcgtgcccctaaaccactggaaaacactgaagcagcacaggcacagccgtctggaagcaaattctctccggccattcctgtttctacccaggagtccgtttctgttccagcaagtgtgagcaccagcattagcagtattagcaccggtgccaccgctagcgccctggttaaaggcaataccaatccgattacaagcatgtctgccccggttcaagcatcagctccagcactgacaaaatcccaaaccgatcgtctggaggttctgctgaatccgaaagacgaaatcagcctgaattccggcaaaccgtttcgtgaactggagagcgaactgctgtcacgtcgtaaaaaagacctgcaacaaatctatgccgaagaacgtgagaactatctggggaaactggaacgtgaaatcacccgctttttcgtggatcgtggctttctggagatcaaatccccgattctgattcctctggagtatatcgagcgtatgggcatcgacaatgataccgaactgagcaaacaaattttccgtgtggataaaaacttctgtctgcgccctatgctagcaccaaatctggctaactatctgcgcaaactggaccgtgccctgcctgatcctatcaaaatcttcgagatcggcccgtgttatcgtaaagagtccgacggtaaagaacatctggaggagtttaccatgctgaacttttgccaaatgggttcaggttgtactcgtgagaacctggaaagcatcatcaccgattttctgaaccacctgggcattgacttcaaaattgtgggcgacagctgtatggtgtttggcgacaccctggatgtcatgcacggcgacctggaactgtctagtgccgttgtgggcccaatcccgctggatcgtgagtggggtatcgacaaaccttggatcggtgcgggttttggtctggagcgtctgctgaaagtaaaacacgacttcaagaacatcaaacgtgctgcacgttccgagtcctattacaatggtatttctactaacctgtaa

SEQ ID NO: 606 - protein, 1223 aa, Artificial Sequence
  Description of Artificial Sequence: Synthetic polypeptide
  EBAG91-29::FUS::SYNZIP4::PylRS(AF)
MAITQFRLFKFCTCLATVFSFLKRLICRSGAPGSAGSAAGSGMASNDYTQQATQSYGAYPTQPGQGYSQQSSQPYGQQSYSGYSQSTDTSGYGQSSYSSYGQSQNTGYGTQSTPQGYGSTGGYGSSQSSQSSYGQQSSYPGYGQQPAPSSTSGSYGSSSQSSSYGQPQSGSYSQQPSYGGQQQSYGQQQSYNPPQGYGQQNQYNSSSGGGGGGGGGGNYGQDQSSMSSGGGSGGGYGNQDQSGGGGSGGYGQQDRGGRGRGGSGGGGGGGGGGYNRSSGGYEPRGRGGGRGGRGGMGGSDRGGFNKFGGPRDQGSRHDSEQDNSDNNTIFVQGLGENVTIESVADYFKQIGIIKTNKKTGQPMINLYTDRETGKLKGEATVSFDDPPSAKAAIDWFDGKEFSGNPIKVSFATRRADFNRGGGNGRGGRGRGGPMGRGGYGGGGSGGGGRGGFPSGGGGGGGQQRAGDWKCPNPTCENMNFSWRNECNQCKAPKPDGPGGGPGGSHMGGNYGDDRRGGRGGAIAQKVAELKNRVAVKLNRNEQLKNKVEELKNRNAYLKNELATLENEVARLENDVAELIAGAPGSAGSAAGSGASIEQKLISEEDLIEGRHMLASKTIVLSVGEATRTLTEIQSTADRQIFEEKVGPLVGRLRLTASLRQNGAKTAYRVNLKLDQADVVDSGLPKVRYTQVWSHDVTIVANSTEASRKSLYDLTKSLVATSQVEDLVVNLVPLGRADPLAGAPGSAGSAAGSGACPVPLQLPPLERLTLDDKKPLNTLISATGLWMSRTGTIHKIKHHEVSRSKIYIEMACGDHLVVNNSRSSRTARALRHHKYRKTCKRCRVSDEDLNKFLTKANEDQTSVKVKVVSAPTRTKKAMPKSVARAPKPLENTEAAQAQPSGSKFSPAIPVSTQESVSVPASVSTSISSISTGATASALVKGNTNPITSMSAPVQASAPALTKSQTDRLEVLLNPKDEISLNSGKPFRELESELLSRRKKDLQQIYAEERENYLGKLEREITRFFVDRGFLEIKSPILIPLEYIERMGIDNDTELSKQIFRVDKNFCLRPMLAPNLANYLRKLDRALPDPIKIFEIGPCYRKESDGKEHLEEFTMLNFCQMGSGCTRENLESIITDFLNHLGIDFKIVGDSCMVFGDTLDVMHGDLELSSAVVGPIPLDREWGIDKPWIGAGFGLERLLKVKHDFKNIKRAARSESYYNGISTNL

SEQ ID NO: 607 - DNA, 3714 bp, Artificial Sequence
  Description of Artificial Sequence: Synthetic polynucleotide
  EBAG91-29::FUS::SYNZIP3::4xlambdaN22::IFRS1
atggccatcacccagtttcggttatttaaattttgtacctgcctagcaacagtattctcattcctaaagagattaatatgcagatctggagcacccggctccgccggctccgccgccggctccggcatggcctcaaacgattatacccaacaagcaacccaaagctatggggcctaccccacccagcccgggcagggctattcccagcagagcagtcagccctacggacagcagagttacagtggttatagccagtccacggacacttcaggatatggccagagcagctattcttcttatggccagagccagaacacaggctatggaactcagtcaactccccagggatatggctcgactggcggctatggcagtagccagagctcccaatcgtcttacgggcagcagtcctcctaccctggctatggccagcagccagctcccagcagcacctcgggaagttacggtagcagttctcagagcagcagctatgggcagccccagagtgggagctacagccagcagcctagctatggtggacagcagcaaagctatggacagcagcaaagctataatccccctcagggctatggacagcagaaccagtacaacagcagcagtggtggtggaggtggaggtggaggtggaggtaactatggccaagatcaatcctccatgagtagtggtggtggcagtggtggcggttatggcaatcaagaccagagtggtggaggtggcagcggtggctatggacagcaggaccgtggaggccgcggcaggggtggcagtggtggcggcggcggcggcggcggtggtggttacaaccgcagcagtggtggctatgaacccagaggtcgtggaggtggccgtggaggcagaggtggcatgggcggaagtgaccgtggtggcttcaataaatttggtggccctcgggaccaaggatcacgtcatgactccgaacaggataattcagacaacaacaccatctttgtgcaaggcctgggtgagaatgttacaattgagtctgtggctgattacttcaagcagattggtattattaagacaaacaagaaaacgggacagcccatgattaatttgtacacagacagggaaactggcaagctgaagggagaggcaacggtctcttttgatgacccaccttcagctaaagcagctattgactggtttgatggtaaagaattctccggaaatcctatcaaggtctcatttgctactcgccgggcagactttaatcggggtggtggcaatggtcgtggaggccgagggcgaggaggacccatgggccgtggaggctatggaggtggtggcagtggtggtggtggccgaggaggatttcccagtggaggtggtggcggtggaggacagcagcgagctggtgactggaagtgtcctaatcccacctgtgagaatatgaacttctcttggaggaatgaatgcaaccagtgtaaggcccctaaaccagatggcccaggagggggaccaggtggctctcacatggggggtaactacggggatgatcgtcgtggtggcagaggtggtgcgatcgcaaatgaggtgaccaccctggaaaacgacgccgccttcatcgagaacgagaacgcctacctggaaaaagagatcgccagactgagaaaggaaaaggccgctctgcggaacagactggcccacaagaagggagcaccaggaagtgctggttctgctgctggtagtggagcatcgatagagcagaagctgatctcagaggaggacctgctagccaccatggacgcacaaacacgacgacgtgagcgtcgcgctgagaaacaagctcaatggaaagctgcaaacccaccgctcgacggagccggagctggcgctggagctggagccggagctggcggtctagccaccatggacgcacaaacacgacgacgtgagcgtcgcgctgagaaacaagctcaatggaaagctgcaaacccaccgctcgacggagccggagctggcgctggagctggagccggagctggcggtctagccaccatggacgcacaaacacgacgacgtgagcgtcgcgctgagaaacaagctcaatggaaagctgcaaacccaccgctcgacggagccggagctggcgctggagctggagccggagctggcggtctagccaccatggacgcacaaacacgacgacgtgagcgtcgcgctgagaaacaagctcaatggaaagctgcaaacccaccgctcgagtctagagggcccgttggtgctcctggttcagcaggaagcgcagcaggatcaggtgcgtgcccggtgccgctgcagctgccgccgctggaacgcctgaccctggatgacaaaaaaccgctgaataccctgatctctgctactggtctgtggatgagtcgtaccggaaccattcataaaatcaaacaccacgaggttagccgttcgaaaatctatattgagatggcgtgtggcgatcatctggttgtgaacaatagccgctcttctcgtacagcacgtgcactgcgtcaccacaaatatcgtaaaacctgtaaacgttgccgtgtgtccgatgaggatctgaacaaattcctgacaaaagccaatgaggaccaaacaagcgtgaaagtgaaagtcgttagcgctcctacccgtactaaaaaagcaatgccgaaatccgttgctcgtgcccctaaaccactggaaaacactgaagcagcacaggcacagccgtctggaagcaaattctctccggccattcctgtttctacccaggagtccgtttctgttccagcaagtgtgagcaccagcattagcagtattagcaccggtgccaccgctagcgccctggttaaaggcaataccaatccgattacaagcatgtctgccccggttcaagcatcagctccagcactgacaaaatcccaaaccgatcgtctggaggttctgctgaatccgaaagacgaaatcagcctgaattccggcaaaccgtttcgtgaactggagagcgaactgctgtcacgtcgtaaaaaagacctgcaacaaatctatgccgaagaacgtgagaactatctggggaaactggaacgtgaaatcacccgctttttcgtggatcgtggctttctggagatcaaatccccgattctgattcctctggagtatatcgagcgtatgggcatcgacaatgataccgaactgagcaaacaaattttccgtgtggataaaaacttctgtctgcgccctatgcttgcaccaaatatgctgaactatagccgcaaactggaccgtgccctgcctgatcctatcaaaatcttcgagatcggcccgtgttatcgtaaagagtccgacggtaaagaacatctggaggagtttaccatgctgtcttttatgcaaatgggttcaggttgtactcgtgagaacctggaaagcatcatcaccgattttctgaaccacctgggcattgacttcaaaattgtgggcgacagctgtatggtgtatggcgacaccctggatgtcatgcacggcgacctggaactgtctagtgccgttgttggaccaattccgctggaccgtgagtggggtatcgacaaaccgtggatcggagcaggattcggtctggaacgcctgctgaaagtgaaacacgacttcaaaaacatcaaacgtgccgcccgttctgaatcgtattataacgggatctctacgaacctgtaa

SEQ ID NO: 608 - protein, 1237 aa, Artificial Sequence
  Description of Artificial Sequence: Synthetic polypeptide
  EBAG91-29::FUS::SYNZIP3::4xlambdaN22::IFRS1
MAITQFRLFKFCTCLATVFSFLKRLICRSGAPGSAGSAAGSGMASNDYTQQATQSYGAYPTQPGQGYSQQSSQPYGQQSYSGYSQSTDTSGYGQSSYSSYGQSQNTGYGTQSTPQGYGSTGGYGSSQSSQSSYGQQSSYPGYGQQPAPSSTSGSYGSSSQSSSYGQPQSGSYSQQPSYGGQQQSYGQQQSYNPPQGYGQQNQYNSSSGGGGGGGGGGNYGQDQSSMSSGGGSGGGYGNQDQSGGGGSGGYGQQDRGGRGRGGSGGGGGGGGGGYNRSSGGYEPRGRGGGRGGRGGMGGSDRGGFNKFGGPRDQGSRHDSEQDNSDNNTIFVQGLGENVTIESVADYFKQIGIIKTNKKTGQPMINLYTDRETGKLKGEATVSFDDPPSAKAAIDWFDGKEFSGNPIKVSFATRRADFNRGGGNGRGGRGRGGPMGRGGYGGGGSGGGGRGGFPSGGGGGGGQQRAGDWKCPNPTCENMNFSWRNECNQCKAPKPDGPGGGPGGSHMGGNYGDDRRGGRGGAIANEVTTLENDAAFIENENAYLEKEIARLRKEKAALRNRLAHKKGAPGSAGSAAGSGASIEQKLISEEDLLATMDAQTRRRERRAEKQAQWKAANPPLDGAGAGAGAGAGAGGLATMDAQTRRRERRAEKQAQWKAANPPLDGAGAGAGAGAGAGGLATMDAQTRRRERRAEKQAQWKAANPPLDGAGAGAGAGAGAGGLATMDAQTRRRERRAEKQAQWKAANPPLESRGPVGAPGSAGSAAGSGACPVPLQLPPLERLTLDDKKPLNTLISATGLWMSRTGTIHKIKHHEVSRSKIYIEMACGDHLVVNNSRSSRTARALRHHKYRKTCKRCRVSDEDLNKFLTKANEDQTSVKVKVVSAPTRTKKAMPKSVARAPKPLENTEAAQAQPSGSKFSPAIPVSTQESVSVPASVSTSISSISTGATASALVKGNTNPITSMSAPVQASAPALTKSQTDRLEVLLNPKDEISLNSGKPFRELESELLSRRKKDLQQIYAEERENYLGKLEREITRFFVDRGFLEIKSPILIPLEYIERMGIDNDTELSKQIFRVDKNFCLRPMLAPNMLNYSRKLDRALPDPIKIFEIGPCYRKESDGKEHLEEFTMLSFMQMGSGCTRENLESIITDFLNHLGIDFKIVGDSCMVYGDTLDVMHGDLELSSAVVGPIPLDREWGIDKPWIGAGFGLERLLKVKHDFKNIKRAARSESYYNGISTNL

SEQ ID NO: 609 - DNA, 3528 bp, Artificial Sequence
  Description of Artificial Sequence: Synthetic polynucleotide
  LCK::FUS::SYNZIP1::MCP::PylRS(AF)
atgggctgcgtgtgcagcagcaaccccgagggtaccgagctcgcctcaaacgattatacccaacaagcaacccaaagctatggggcctaccccacccagcccgggcagggctattcccagcagagcagtcagccctacggacagcagagttacagtggttatagccagtccacggacacttcaggatatggccagagcagctattcttcttatggccagagccagaacacaggctatggaactcagtcaactccccagggatatggctcgactggcggctatggcagtagccagagctcccaatcgtcttacgggcagcagtcctcctaccctggctatggccagcagccagctcccagcagcacctcgggaagttacggtagcagttctcagagcagcagctatgggcagccccagagtgggagctacagccagcagcctagctatggtggacagcagcaaagctatggacagcagcaaagctataatccccctcagggctatggacagcagaaccagtacaacagcagcagtggtggtggaggtggaggtggaggtggaggtaactatggccaagatcaatcctccatgagtagtggtggtggcagtggtggcggttatggcaatcaagaccagagtggtggaggtggcagcggtggctatggacagcaggaccgtggaggccgcggcaggggtggcagtggtggcggcggcggcggcggcggtggtggttacaaccgcagcagtggtggctatgaacccagaggtcgtggaggtggccgtggaggcagaggtggcatgggcggaagtgaccgtggtggcttcaataaatttggtggccctcgggaccaaggatcacgtcatgactccgaacaggataattcagacaacaacaccatctttgtgcaaggcctgggtgagaatgttacaattgagtctgtggctgattacttcaagcagattggtattattaagacaaacaagaaaacgggacagcccatgattaatttgtacacagacagggaaactggcaagctgaagggagaggcaacggtctcttttgatgacccaccttcagctaaagcagctattgactggtttgatggtaaagaattctccggaaatcctatcaaggtctcatttgctactcgccgggcagactttaatcggggtggtggcaatggtcgtggaggccgagggcgaggaggacccatgggccgtggaggctatggaggtggtggcagtggtggtggtggccgaggaggatttcccagtggaggtggtggcggtggaggacagcagcgagctggtgactggaagtgtcctaatcccacctgtgagaatatgaacttctcttggaggaatgaatgcaaccagtgtaaggcccctaaaccagatggcccaggagggggaccaggtggctctcacatggggggtaactacggggatgatcgtcgtggtggcagaggaggcgcgatcgcaaatctggtggcccagctggaaaacgaggtggccagcctggaaaacgagaacgaaaccctgaagaaaaagaacctgcacaagaaggacctgatcgcctacctggaaaaggaaatcgccaacctgagaaagaagatcgaggaagcatcgatatatccctatgatgtgccggattatgctggagcaccaggaagtgctggttctgctgctggtagtggagcttctaactttactcagttcgttctcgtcgacaatggcggaactggcgacgtgactgtcgccccaagcaacttcgctaacgggatcgctgaatggatcagctctaactcgcgttcacaggcttacaaagtaacctgtagcgttcgtcagagctctgcgcagaatcgcaaatacaccatcaaagtcgaggtgcctaaaggcgcctggcgttcgtacttaaatatggaactaaccattccaattttcgccacgaattccgactgcgagcttattgttaaggcaatgcaaggtctcctaaaagatggaaacccgattccctcagcaatcgcagcaaactccggcatctacggcgccgattacaaggacgatgatgacaagggagcaccaggaagtgctggttctgctgctggtagtggagcgtgcccggtgccgctgcagctgccgccgctggaacgcctgaccctggatgataaaaaaccgctgaataccctgatctctgctactggtctgtggatgagtcgtaccggaaccattcataaaatcaaacaccacgaggttagccgttcgaaaatctatattgagatggcgtgtggcgatcatctggttgtgaacaatagccgctcttctcgtacagcacgtgcactgcgtcaccacaaatatcgtaaaacctgtaaacgttgccgtgtgtccgatgaggatctgaacaaattcctgacaaaagccaatgaggaccaaacaagcgtgaaagtgaaagtcgttagcgctcctacccgtactaaaaaagcaatgccgaaatccgttgctcgtgcccctaaaccactggaaaacactgaagcagcacaggcacagccgtctggaagcaaattctctccggccattcctgtttctacccaggagtccgtttctgttccagcaagtgtgagcaccagcattagcagtattagcaccggtgccaccgctagcgccctggttaaaggcaataccaatccgattacaagcatgtctgccccggttcaagcatcagctccagcactgacaaaatcccaaaccgatcgtctggaggttctgctgaatccgaaagacgaaatcagcctgaattccggcaaaccgtttcgtgaactggagagcgaactgctgtcacgtcgtaaaaaagacctgcaacaaatctatgccgaagaacgtgagaactatctggggaaactggaacgtgaaatcacccgctttttcgtggatcgtggctttctggagatcaaatccccgattctgattcctctggagtatatcgagcgtatgggcatcgacaatgataccgaactgagcaaacaaattttccgtgtggataaaaacttctgtctgcgccctatgctagcaccaaatctggctaactatctgcgcaaactggaccgtgccctgcctgatcctatcaaaatcttcgagatcggcccgtgttatcgtaaagagtccgacggtaaagaacatctggaggagtttaccatgctgaacttttgccaaatgggttcaggttgtactcgtgagaacctggaaagcatcatcaccgattttctgaaccacctgggcattgacttcaaaattgtgggcgacagctgtatggtgtttggcgacaccctggatgtcatgcacggcgacctggaactgtctagtgccgttgtgggcccaatcccgctggatcgtgagtggggtatcgacaaaccttggatcggtgcgggttttggtctggagcgtctgctgaaagtaaaacacgacttcaagaacatcaaacgtgctgcacgttccgagtcctattacaatggtatttctactaacctgtaa

SEQ ID NO: 610 - protein, 1175 aa, Artificial Sequence
  Description of Artificial Sequence: Synthetic polypeptide
  LCK::FUS::SYNZIP1::MCP::PylRS(AF)
MGCVCSSNPEGTELASNDYTQQATQSYGAYPTQPGQGYSQQSSQPYGQQSYSGYSQSTDTSGYGQSSYSSYGQSQNTGYGTQSTPQGYGSTGGYGSSQSSQSSYGQQSSYPGYGQQPAPSSTSGSYGSSSQSSSYGQPQSGSYSQQPSYGGQQQSYGQQQSYNPPQGYGQQNQYNSSSGGGGGGGGGGNYGQDQSSMSSGGGSGGGYGNQDQSGGGGSGGYGQQDRGGRGRGGSGGGGGGGGGGYNRSSGGYEPRGRGGGRGGRGGMGGSDRGGFNKFGGPRDQGSRHDSEQDNSDNNTIFVQGLGENVTIESVADYFKQIGIIKTNKKTGQPMINLYTDRETGKLKGEATVSFDDPPSAKAAIDWFDGKEFSGNPIKVSFATRRADFNRGGGNGRGGRGRGGPMGRGGYGGGGSGGGGRGGFPSGGGGGGGQQRAGDWKCPNPTCENMNFSWRNECNQCKAPKPDGPGGGPGGSHMGGNYGDDRRGGRGGAIANLVAQLENEVASLENENETLKKKNLHKKDLIAYLEKEIANLRKKIEEASIYPYDVPDYAGAPGSAGSAAGSGASNFTQFVLVDNGGTGDVTVAPSNFANGIAEWISSNSRSQAYKVTCSVRQSSAQNRKYTIKVEVPKGAWRSYLNMELTIPIFATNSDCELIVKAMQGLLKDGNPIPSAIAANSGIYGADYKDDDDKGAPGSAGSAAGSGACPVPLQLPPLERLTLDDKKPLNTLISATGLWMSRTGTIHKIKHHEVSRSKIYIEMACGDHLVVNNSRSSRTARALRHHKYRKTCKRCRVSDEDLNKFLTKANEDQTSVKVKVVSAPTRTKKAMPKSVARAPKPLENTEAAQAQPSGSKFSPAIPVSTQESVSVPASVSTSISSISTGATASALVKGNTNPITSMSAPVQASAPALTKSQTDRLEVLLNPKDEISLNSGKPFRELESELLSRRKKDLQQIYAEERENYLGKLEREITRFFVDRGFLEIKSPILIPLEYIERMGIDNDTELSKQIFRVDKNFCLRPMLAPNLANYLRKLDRALPDPIKIFEIGPCYRKESDGKEHLEEFTMLNFCQMGSGCTRENLESIITDFLNHLGIDFKIVGDSCMVFGDTLDVMHGDLELSSAVVGPIPLDREWGIDKPWIGAGFGLERLLKVKHDFKNIKRAARSESYYNGISTNL

SEQ ID NO: 611 - DNA, 3537 bp, Artificial Sequence
  Description of Artificial Sequence: Synthetic polynucleotide
  LCK::FUS::SYNZIP2::MCP::PylRS(AF)
atgggctgcgtgtgcagcagcaaccccgagggtaccgagctcgcctcaaacgattatacccaacaagcaacccaaagctatggggcctaccccacccagcccgggcagggctattcccagcagagcagtcagccctacggacagcagagttacagtggttatagccagtccacggacacttcaggatatggccagagcagctattcttcttatggccagagccagaacacaggctatggaactcagtcaactccccagggatatggctcgactggcggctatggcagtagccagagctcccaatcgtcttacgggcagcagtcctcctaccctggctatggccagcagccagctcccagcagcacctcgggaagttacggtagcagttctcagagcagcagctatgggcagccccagagtgggagctacagccagcagcctagctatggtggacagcagcaaagctatggacagcagcaaagctataatccccctcagggctatggacagcagaaccagtacaacagcagcagtggtggtggaggtggaggtggaggtggaggtaactatggccaagatcaatcctccatgagtagtggtggtggcagtggtggcggttatggcaatcaagaccagagtggtggaggtggcagcggtggctatggacagcaggaccgtggaggccgcggcaggggtggcagtggtggcggcggcggcggcggcggtggtggttacaaccgcagcagtggtggctatgaacccagaggtcgtggaggtggccgtggaggcagaggtggcatgggcggaagtgaccgtggtggcttcaataaatttggtggccctcgggaccaaggatcacgtcatgactccgaacaggataattcagacaacaacaccatctttgtgcaaggcctgggtgagaatgttacaattgagtctgtggctgattacttcaagcagattggtattattaagacaaacaagaaaacgggacagcccatgattaatttgtacacagacagggaaactggcaagctgaagggagaggcaacggtctcttttgatgacccaccttcagctaaagcagctattgactggtttgatggtaaagaattctccggaaatcctatcaaggtctcatttgctactcgccgggcagactttaatcggggtggtggcaatggtcgtggaggccgagggcgaggaggacccatgggccgtggaggctatggaggtggtggcagtggtggtggtggccgaggaggatttcccagtggaggtggtggcggtggaggacagcagcgagctggtgactggaagtgtcctaatcccacctgtgagaatatgaacttctcttggaggaatgaatgcaaccagtgtaaggcccctaaaccagatggcccaggagggggaccaggtggctctcacatggggggtaactacggggatgatcgtcgtggtggcagaggaggcgcgatcgcagctagaaacgcctacctgagaaagaaaatcgccagactgaagaaggacaacctgcagctggaaagagacgagcagaacctggaaaagatcatcgccaacctcagagatgagatcgccagactggaaaacgaggtggccagccacgagcaggcatcgatatatccctatgatgtgccggattatgctggagcaccaggaagtgctggttctgctgctggtagtggagcttctaactttactcagttcgttctcgtcgacaatggcggaactggcgacgtgactgtcgccccaagcaacttcgctaacgggatcgctgaatggatcagctctaactcgcgttcacaggcttacaaagtaacctgtagcgttcgtcagagctctgcgcagaatcgcaaatacaccatcaaagtcgaggtgcctaaaggcgcctggcgttcgtacttaaatatggaactaaccattccaattttcgccacgaattccgactgcgagcttattgttaaggcaatgcaaggtctcctaaaagatggaaacccgattccctcagcaatcgcagcaaactccggcatctacggcgccgattacaaggacgatgatgacaagggagcaccaggaagtgctggttctgctgctggtagtggagcgtgcccggtgccgctgcagctgccgccgctggaacgcctgaccctggatgataaaaaaccgctgaataccctgatctctgctactggtctgtggatgagtcgtaccggaaccattcataaaatcaaacaccacgaggttagccgttcgaaaatctatattgagatggcgtgtggcgatcatctggttgtgaacaatagccgctcttctcgtacagcacgtgcactgcgtcaccacaaatatcgtaaaacctgtaaacgttgccgtgtgtccgatgaggatctgaacaaattcctgacaaaagccaatgaggaccaaacaagcgtgaaagtgaaagtcgttagcgctcctacccgtactaaaaaagcaatgccgaaatccgttgctcgtgcccctaaaccactggaaaacactgaagcagcacaggcacagccgtctggaagcaaattctctccggccattcctgtttctacccaggagtccgtttctgttccagcaagtgtgagcaccagcattagcagtattagcaccggtgccaccgctagcgccctggttaaaggcaataccaatccgattacaagcatgtctgccccggttcaagcatcagctccagcactgacaaaatcccaaaccgatcgtctggaggttctgctgaatccgaaagacgaaatcagcctgaattccggcaaaccgtttcgtgaactggagagcgaactgctgtcacgtcgtaaaaaagacctgcaacaaatctatgccgaagaacgtgagaactatctggggaaactggaacgtgaaatcacccgctttttcgtggatcgtggctttctggagatcaaatccccgattctgattcctctggagtatatcgagcgtatgggcatcgacaatgataccgaactgagcaaacaaattttccgtgtggataaaaacttctgtctgcgccctatgctagcaccaaatctggctaactatctgcgcaaactggaccgtgccctgcctgatcctatcaaaatcttcgagatcggcccgtgttatcgtaaagagtccgacggtaaagaacatctggaggagtttaccatgctgaacttttgccaaatgggttcaggttgtactcgtgagaacctggaaagcatcatcaccgattttctgaaccacctgggcattgacttcaaaattgtgggcgacagctgtatggtgtttggcgacaccctggatgtcatgcacggcgacctggaactgtctagtgccgttgtgggcccaatcccgctggatcgtgagtggggtatcgacaaaccttggatcggtgcgggttttggtctggagcgtctgctgaaagtaaaacacgacttcaagaacatcaaacgtgctgcacgttccgagtcctattacaatggtatttctactaacctgtaa

SEQ ID NO: 612 - protein, 1178 aa, Artificial Sequence
  Description of Artificial Sequence: Synthetic polypeptide
  LCK::FUS::SYNZIP2::MCP::PylRS(AF)
MGCVCSSNPEGTELASNDYTQQATQSYGAYPTQPGQGYSQQSSQPYGQQSYSGYSQSTDTSGYGQSSYSSYGQSQNTGYGTQSTPQGYGSTGGYGSSQSSQSSYGQQSSYPGYGQQPAPSSTSGSYGSSSQSSSYGQPQSGSYSQQPSYGGQQQSYGQQQSYNPPQGYGQQNQYNSSSGGGGGGGGGGNYGQDQSSMSSGGGSGGGYGNQDQSGGGGSGGYGQQDRGGRGRGGSGGGGGGGGGGYNRSSGGYEPRGRGGGRGGRGGMGGSDRGGFNKFGGPRDQGSRHDSEQDNSDNNTIFVQGLGENVTIESVADYFKQIGIIKTNKKTGQPMINLYTDRETGKLKGEATVSFDDPPSAKAAIDWFDGKEFSGNPIKVSFATRRADFNRGGGNGRGGRGRGGPMGRGGYGGGGSGGGGRGGFPSGGGGGGGQQRAGDWKCPNPTCENMNFSWRNECNQCKAPKPDGPGGGPGGSHMGGNYGDDRRGGRGGAIAARNAYLRKKIARLKKDNLQLERDEQNLEKIIANLRDEIARLENEVASHEQASIYPYDVPDYAGAPGSAGSAAGSGASNFTQFVLVDNGGTGDVTVAPSNFANGIAEWISSNSRSQAYKVTCSVRQSSAQNRKYTIKVEVPKGAWRSYLNMELTIPIFATNSDCELIVKAMQGLLKDGNPIPSAIAANSGIYGADYKDDDDKGAPGSAGSAAGSGACPVPLQLPPLERLTLDDKKPLNTLISATGLWMSRTGTIHKIKHHEVSRSKIYIEMACGDHLVVNNSRSSRTARALRHHKYRKTCKRCRVSDEDLNKFLTKANEDQTSVKVKVVSAPTRTKKAMPKSVARAPKPLENTEAAQAQPSGSKFSPAIPVSTQESVSVPASVSTSISSISTGATASALVKGNTNPITSMSAPVQASAPALTKSQTDRLEVLLNPKDEISLNSGKPFRELESELLSRRKKDLQQIYAEERENYLGKLEREITRFFVDRGFLEIKSPILIPLEYIERMGIDNDTELSKQIFRVDKNFCLRPMLAPNLANYLRKLDRALPDPIKIFEIGPCYRKESDGKEHLEEFTMLNFCQMGSGCTRENLESIITDFLNHLGIDFKIVGDSCMVFGDTLDVMHGDLELSSAVVGPIPLDREWGIDKPWIGAGFGLERLLKVKHDFKNIKRAARSESYYNGISTNL

SEQ ID NO: 613 - DNA, 4797 bp, Artificial Sequence
  Description of Artificial Sequence: Synthetic polynucleotide
  CG1::FUS::SYNZIP1::MCP::PylRS(AF)
atggccatttgtcaattcttccttcaaggccggtgccgctttggagatcggtgctggaacgaacatcccggtgctaggggtgcaggaggaggacggcagcaaccgcagcagcagccttcaggtaataatagacgtggatggaatacaactagccagagatattccaatgtcatccagccatccagtttctccaaatccacaccatgggggggcagcagagatcaagaaaagccatatttcagttcttttgattctggagcttcaactaacaggaaggaaggctttggattgtctgagaacccatttgcttcacttagtcctgatgagcagaaagatgaaaagaaacttctggaaggaattgtaaaagatatggaggtttgggaatcatcagggcagtggatgttttctgtttattcaccagtgaaaaagaaacctaatatttcaggttttacagacatttcaccagaggaattgaggcttgaataccataacttcttaaccagcaataacttacagagttatctaaattctgtccaacgtttaataaatcaatggaggaacagggtaaatgaactgaaaagtctaaatatatcaactaaagtagctttgctctctgatgtaaaggatggagtaaatcaagcagcacctgcatttggatttggcagcagtcaagcagcaacatttatgtcgccaggctttccagtcaataacagcagcagtgataatgctcagaactttagttttaaaacaaactctggatttgctgctgcctcttctggaagccctgctggttttgggagttccccagcatttggagctgcagcctctaccagttcaggtatctctacttctgctccagcttttggatttgggaagcctgaagtcacatcggctgcatcattttcattcaaaagccctgcagcttccagttttggatcacctggattttcaggacttccagcttccttggcaacaggtcctgtcagagctccagtggccccagcctttggaggtggcagttctgtggctggttttggtagtccgggctcacattctcacactgctttttctaagccatccagtgacacttttggaaatagcagcatatccacttctctgtcagcctcaagcagcatcattgcaacagataatgtgttattcacacccagagataaactaacagtagaagaactggaacaatttcaatccaagaaatttactctgggaaaaattccattaaagcctccacctctggaacttctaaatgttggagcacccggctccgccggctccgccgccggctccggcatggcctcaaacgattatacccaacaagcaacccaaagctatggggcctaccccacccagcccgggcagggctattcccagcagagcagtcagccctacggacagcagagttacagtggttatagccagtccacggacacttcaggatatggccagagcagctattcttcttatggccagagccagaacacaggctatggaactcagtcaactccccagggatatggctcgactggcggctatggcagtagccagagctcccaatcgtcttacgggcagcagtcctcctaccctggctatggccagcagccagctcccagcagcacctcgggaagttacggtagcagttctcagagcagcagctatgggcagccccagagtgggagctacagccagcagcctagctatggtggacagcagcaaagctatggacagcagcaaagctataatccccctcagggctatggacagcagaaccagtacaacagcagcagtggtggtggaggtggaggtggaggtggaggtaactatggccaagatcaatcctccatgagtagtggtggtggcagtggtggcggttatggcaatcaagaccagagtggtggaggtggcagcggtggctatggacagcaggaccgtggaggccgcggcaggggtggcagtggtggcggcggcggcggcggcggtggtggttacaaccgcagcagtggtggctatgaacccagaggtcgtggaggtggccgtggaggcagaggtggcatgggcggaagtgaccgtggtggcttcaataaatttggtggccctcgggaccaaggatcacgtcatgactccgaacaggataattcagacaacaacaccatctttgtgcaaggcctgggtgagaatgttacaattgagtctgtggctgattacttcaagcagattggtattattaagacaaacaagaaaacgggacagcccatgattaatttgtacacagacagggaaactggcaagctgaagggagaggcaacggtctcttttgatgacccaccttcagctaaagcagctattgactggtttgatggtaaagaattctccggaaatcctatcaaggtctcatttgctactcgccgggcagactttaatcggggtggtggcaatggtcgtggaggccgagggcgaggaggacccatgggccgtggaggctatggaggtggtggcagtggtggtggtggccgaggaggatttcccagtggaggtggtggcggtggaggacagcagcgagctggtgactggaagtgtcctaatcccacctgtgagaatatgaacttctcttggaggaatgaatgcaaccagtgtaaggcccctaaaccagatggcccaggagggggaccaggtggctctcacatggggggtaactacggggatgatcgtcgtggtggcagaggtggtgcgatcgcaaatctggtggcccagctggaaaacgaggtggccagcctggaaaacgagaacgaaaccctgaagaaaaagaacctgcacaagaaggacctgatcgcctacctggaaaaggaaatcgccaacctgagaaagaagatcgaggaagcatcgatatatccctatgatgtgccggattatgctggagcaccaggaagtgctggttctgctgctggtagtggagcttctaactttactcagttcgttctcgtcgacaatggcggaactggcgacgtgactgtcgccccaagcaacttcgctaacgggatcgctgaatggatcagctctaactcgcgttcacaggcttacaaagtaacctgtagcgttcgtcagagctctgcgcagaatcgcaaatacaccatcaaagtcgaggtgcctaaaggcgcctggcgttcgtacttaaatatggaactaaccattccaattttcgccacgaattccgactgcgagcttattgttaaggcaatgcaaggtctcctaaaagatggaaacccgattccctcagcaatcgcagcaaactccggcatctacggcgccgattacaaggacgatgatgacaagggagcaccaggaagtgctggttctgctgctggtagtggagcgtgcccggtgccgctgcagctgccgccgctggaacgcctgaccctggatgataaaaaaccgctgaataccctgatctctgctactggtctgtggatgagtcgtaccggaaccattcataaaatcaaacaccacgaggttagccgttcgaaaatctatattgagatggcgtgtggcgatcatctggttgtgaacaatagccgctcttctcgtacagcacgtgcactgcgtcaccacaaatatcgtaaaacctgtaaacgttgccgtgtgtccgatgaggatctgaacaaattcctgacaaaagccaatgaggaccaaacaagcgtgaaagtgaaagtcgttagcgctcctacccgtactaaaaaagcaatgccgaaatccgttgctcgtgcccctaaaccactggaaaacactgaagcagcacaggcacagccgtctggaagcaaattctctccggccattcctgtttctacccaggagtccgtttctgttccagcaagtgtgagcaccagcattagcagtattagcaccggtgccaccgctagcgccctggttaaaggcaataccaatccgattacaagcatgtctgccccggttcaagcatcagctccagcactgacaaaatcccaaaccgatcgtctggaggttctgctgaatccgaaagacgaaatcagcctgaattccggcaaaccgtttcgtgaactggagagcgaactgctgtcacgtcgtaaaaaagacctgcaacaaatctatgccgaagaacgtgagaactatctggggaaactggaacgtgaaatcacccgctttttcgtggatcgtggctttctggagatcaaatccccgattctgattcctctggagtatatcgagcgtatgggcatcgacaatgataccgaactgagcaaacaaattttccgtgtggataaaaacttctgtctgcgccctatgctagcaccaaatctggctaactatctgcgcaaactggaccgtgccctgcctgatcctatcaaaatcttcgagatcggcccgtgttatcgtaaagagtccgacggtaaagaacatctggaggagtttaccatgctgaacttttgccaaatgggttcaggttgtactcgtgagaacctggaaagcatcatcaccgattttctgaaccacctgggcattgacttcaaaattgtgggcgacagctgtatggtgtttggcgacaccctggatgtcatgcacggcgacctggaactgtctagtgccgttgtgggcccaatcccgctggatcgtgagtggggtatcgacaaaccttggatcggtgcgggttttggtctggagcgtctgctgaaagtaaaacacgacttcaagaacatcaaacgtgctgcacgttccgagtcctattacaatggtatttctactaacctgtaa

SEQ ID NO: 614 - protein, 1598 aa, Artificial Sequence
  Description of Artificial Sequence: Synthetic polypeptide
  CG1::FUS::SYNZIP1::MCP::PylRS(AF)
MAICQFFLQGRCRFGDRCWNEHPGARGAGGGRQQPQQQPSGNNRRGWNTTSQRYSNVIQPSSFSKSTPWGGSRDQEKPYFSSFDSGASTNRKEGFGLSENPFASLSPDEQKDEKKLLEGIVKDMEVWESSGQWMFSVYSPVKKKPNISGFTDISPEELRLEYHNFLTSNNLQSYLNSVQRLINQWRNRVNELKSLNISTKVALLSDVKDGVNQAAPAFGFGSSQAATFMSPGFPVNNSSSDNAQNFSFKTNSGFAAASSGSPAGFGSSPAFGAAASTSSGISTSAPAFGFGKPEVTSAASFSFKSPAASSFGSPGFSGLPASLATGPVRAPVAPAFGGGSSVAGFGSPGSHSHTAFSKPSSDTFGNSSISTSLSASSSIIATDNVLFTPRDKLTVEELEQFQSKKFTLGKIPLKPPPLELLNVGAPGSAGSAAGSGMASNDYTQQATQSYGAYPTQPGQGYSQQSSQPYGQQSYSGYSQSTDTSGYGQSSYSSYGQSQNTGYGTQSTPQGYGSTGGYGSSQSSQSSYGQQSSYPGYGQQPAPSSTSGSYGSSSQSSSYGQPQSGSYSQQPSYGGQQQSYGQQQSYNPPQGYGQQNQYNSSSGGGGGGGGGGNYGQDQSSMSSGGGSGGGYGNQDQSGGGGSGGYGQQDRGGRGRGGSGGGGGGGGGGYNRSSGGYEPRGRGGGRGGRGGMGGSDRGGFNKFGGPRDQGSRHDSEQDNSDNNTIFVQGLGENVTIESVADYFKQIGIIKTNKKTGQPMINLYTDRETGKLKGEATVSFDDPPSAKAAIDWFDGKEFSGNPIKVSFATRRADFNRGGGNGRGGRGRGGPMGRGGYGGGGSGGGGRGGFPSGGGGGGGQQRAGDWKCPNPTCENMNFSWRNECNQCKAPKPDGPGGGPGGSHMGGNYGDDRRGGRGGAIANLVAQLENEVASLENENETLKKKNLHKKDLIAYLEKEIANLRKKIEEASIYPYDVPDYAGAPGSAGSAAGSGASNFTQFVLVDNGGTGDVTVAPSNFANGIAEWISSNSRSQAYKVTCSVRQSSAQNRKYTIKVEVPKGAWRSYLNMELTIPIFATNSDCELIVKAMQGLLKDGNPIPSAIAANSGIYGADYKDDDDKGAPGSAGSAAGSGACPVPLQLPPLERLTLDDKKPLNTLISATGLWMSRTGTIHKIKHHEVSRSKIYIEMACGDHLVVNNSRSSRTARALRHHKYRKTCKRCRVSDEDLNKFLTKANEDQTSVKVKVVSAPTRTKKAMPKSVARAPKPLENTEAAQAQPSGSKFSPAIPVSTQESVSVPASVSTSISSISTGATASALVKGNTNPITSMSAPVQASAPALTKSQTDRLEVLLNPKDEISLNSGKPFRELESELLSRRKKDLQQIYAEERENYLGKLEREITRFFVDRGFLEIKSPILIPLEYIERMGIDNDTELSKQIFRVDKNFCLRPMLAPNLANYLRKLDRALPDPIKIFEIGPCYRKESDGKEHLEEFTMLNFCQMGSGCTRENLESIITDFLNHLGIDFKIVGDSCMVFGDTLDVMHGDLELSSAVVGPIPLDREWGIDKPWIGAGFGLERLLKVKHDFKNIKRAARSESYYNGISTNL

SEQ ID NO: 615 - DNA, 4806 bp, Artificial Sequence
  Description of Artificial Sequence: Synthetic polynucleotide
  CG1::FUS::SYNZIP2::MCP::PylRS(AF)
atggccatttgtcaattcttccttcaaggccggtgccgctttggagatcggtgctggaacgaacatcccggtgctaggggtgcaggaggaggacggcagcaaccgcagcagcagccttcaggtaataatagacgtggatggaatacaactagccagagatattccaatgtcatccagccatccagtttctccaaatccacaccatgggggggcagcagagatcaagaaaagccatatttcagttcttttgattctggagcttcaactaacaggaaggaaggctttggattgtctgagaacccatttgcttcacttagtcctgatgagcagaaagatgaaaagaaacttctggaaggaattgtaaaagatatggaggtttgggaatcatcagggcagtggatgttttctgtttattcaccagtgaaaaagaaacctaatatttcaggttttacagacatttcaccagaggaattgaggcttgaataccataacttcttaaccagcaataacttacagagttatctaaattctgtccaacgtttaataaatcaatggaggaacagggtaaatgaactgaaaagtctaaatatatcaactaaagtagctttgctctctgatgtaaaggatggagtaaatcaagcagcacctgcatttggatttggcagcagtcaagcagcaacatttatgtcgccaggctttccagtcaataacagcagcagtgataatgctcagaactttagttttaaaacaaactctggatttgctgctgcctcttctggaagccctgctggttttgggagttccccagcatttggagctgcagcctctaccagttcaggtatctctacttctgctccagcttttggatttgggaagcctgaagtcacatcggctgcatcattttcattcaaaagccctgcagcttccagttttggatcacctggattttcaggacttccagcttccttggcaacaggtcctgtcagagctccagtggccccagcctttggaggtggcagttctgtggctggttttggtagtccgggctcacattctcacactgctttttctaagccatccagtgacacttttggaaatagcagcatatccacttctctgtcagcctcaagcagcatcattgcaacagataatgtgttattcacacccagagataaactaacagtagaagaactggaacaatttcaatccaagaaatttactctgggaaaaattccattaaagcctccacctctggaacttctaaatgttggagcacccggctccgccggctccgccgccggctccggcatggcctcaaacgattatacccaacaagcaacccaaagctatggggcctaccccacccagcccgggcagggctattcccagcagagcagtcagccctacggacagcagagttacagtggttatagccagtccacggacacttcaggatatggccagagcagctattcttcttatggccagagccagaacacaggctatggaactcagtcaactccccagggatatggctcgactggcggctatggcagtagccagagctcccaatcgtcttacgggcagcagtcctcctaccctggctatggccagcagccagctcccagcagcacctcgggaagttacggtagcagttctcagagcagcagctatgggcagccccagagtgggagctacagccagcagcctagctatggtggacagcagcaaagctatggacagcagcaaagctataatccccctcagggctatggacagcagaaccagtacaacagcagcagtggtggtggaggtggaggtggaggtggaggtaactatggccaagatcaatcctccatgagtagtggtggtggcagtggtggcggttatggcaatcaagaccagagtggtggaggtggcagcggtggctatggacagcaggaccgtggaggccgcggcaggggtggcagtggtggcggcggcggcggcggcggtggtggttacaaccgcagcagtggtggctatgaacccagaggtcgtggaggtggccgtggaggcagaggtggcatgggcggaagtgaccgtggtggcttcaataaatttggtggccctcgggaccaaggatcacgtcatgactccgaacaggataattcagacaacaacaccatctttgtgcaaggcctgggtgagaatgttacaattgagtctgtggctgattacttcaagcagattggtattattaagacaaacaagaaaacgggacagcccatgattaatttgtacacagacagggaaactggcaagctgaagggagaggcaacggtctcttttgatgacccaccttcagctaaagcagctattgactggtttgatggtaaagaattctccggaaatcctatcaaggtctcatttgctactcgccgggcagactttaatcggggtggtggcaatggtcgtggaggccgagggcgaggaggacccatgggccgtggaggctatggaggtggtggcagtggtggtggtggccgaggaggatttcccagtggaggtggtggcggtggaggacagcagcgagctggtgactggaagtgtcctaatcccacctgtgagaatatgaacttctcttggaggaatgaatgcaaccagtgtaaggcccctaaaccagatggcccaggagggggaccaggtggctctcacatggggggtaactacggggatgatcgtcgtggtggcagaggtggtgcgatcgcagctagaaacgcctacctgagaaagaaaatcgccagactgaagaaggacaacctgcagctggaaagagacgagcagaacctggaaaagatcatcgccaacctcagagatgagatcgccagactggaaaacgaggtggccagccacgagcaggcatcgatatatccctatgatgtgccggattatgctggagcaccaggaagtgctggttctgctgctggtagtggagcttctaactttactcagttcgttctcgtcgacaatggcggaactggcgacgtgactgtcgccccaagcaacttcgctaacgggatcgctgaatggatcagctctaactcgcgttcacaggcttacaaagtaacctgtagcgttcgtcagagctctgcgcagaatcgcaaatacaccatcaaagtcgaggtgcctaaaggcgcctggcgttcgtacttaaatatggaactaaccattccaattttcgccacgaattccgactgcgagcttattgttaaggcaatgcaaggtctcctaaaagatggaaacccgattccctcagcaatcgcagcaaactccggcatctacggcgccgattacaaggacgatgatgacaagggagcaccaggaagtgctggttctgctgctggtagtggagcgtgcccggtgccgctgcagctgccgccgctggaacgcctgaccctggatgataaaaaaccgctgaataccctgatctctgctactggtctgtggatgagtcgtaccggaaccattcataaaatcaaacaccacgaggttagccgttcgaaaatctatattgagatggcgtgtggcgatcatctggttgtgaacaatagccgctcttctcgtacagcacgtgcactgcgtcaccacaaatatcgtaaaacctgtaaacgttgccgtgtgtccgatgaggatctgaacaaattcctgacaaaagccaatgaggaccaaacaagcgtgaaagtgaaagtcgttagcgctcctacccgtactaaaaaagcaatgccgaaatccgttgctcgtgcccctaaaccactggaaaacactgaagcagcacaggcacagccgtctggaagcaaattctctccggccattcctgtttctacccaggagtccgtttctgttccagcaagtgtgagcaccagcattagcagtattagcaccggtgccaccgctagcgccctggttaaaggcaataccaatccgattacaagcatgtctgccccggttcaagcatcagctccagcactgacaaaatcccaaaccgatcgtctggaggttctgctgaatccgaaagacgaaatcagcctgaattccggcaaaccgtttcgtgaactggagagcgaactgctgtcacgtcgtaaaaaagacctgcaacaaatctatgccgaagaacgtgagaactatctggggaaactggaacgtgaaatcacccgctttttcgtggatcgtggctttctggagatcaaatccccgattctgattcctctggagtatatcgagcgtatgggcatcgacaatgataccgaactgagcaaacaaattttccgtgtggataaaaacttctgtctgcgccctatgctagcaccaaatctggctaactatctgcgcaaactggaccgtgccctgcctgatcctatcaaaatcttcgagatcggcccgtgttatcgtaaagagtccgacggtaaagaacatctggaggagtttaccatgctgaacttttgccaaatgggttcaggttgtactcgtgagaacctggaaagcatcatcaccgattttctgaaccacctgggcattgacttcaaaattgtgggcgacagctgtatggtgtttggcgacaccctggatgtcatgcacggcgacctggaactgtctagtgccgttgtgggcccaatcccgctggatcgtgagtggggtatcgacaaaccttggatcggtgcgggttttggtctggagcgtctgctgaaagtaaaacacgacttcaagaacatcaaacgtgctgcacgttccgagtcctattacaatggtatttctactaacctgtaa

SEQ ID NO: 616 - protein, 1601 aa, Artificial Sequence
  Description of Artificial Sequence: Synthetic polypeptide
  CG1::FUS::SYNZIP2::MCP::PylRS(AF)
MAICQFFLQGRCRFGDRCWNEHPGARGAGGGRQQPQQQPSGNNRRGWNTTSQRYSNVIQPSSFSKSTPWGGSRDQEKPYFSSFDSGASTNRKEGFGLSENPFASLSPDEQKDEKKLLEGIVKDMEVWESSGQWMFSVYSPVKKKPNISGFTDISPEELRLEYHNFLTSNNLQSYLNSVQRLINQWRNRVNELKSLNISTKVALLSDVKDGVNQAAPAFGFGSSQAATFMSPGFPVNNSSSDNAQNFSFKTNSGFAAASSGSPAGFGSSPAFGAAASTSSGISTSAPAFGFGKPEVTSAASFSFKSPAASSFGSPGFSGLPASLATGPVRAPVAPAFGGGSSVAGFGSPGSHSHTAFSKPSSDTFGNSSISTSLSASSSIIATDNVLFTPRDKLTVEELEQFQSKKFTLGKIPLKPPPLELLNVGAPGSAGSAAGSGMASNDYTQQATQSYGAYPTQPGQGYSQQSSQPYGQQSYSGYSQSTDTSGYGQSSYSSYGQSQNTGYGTQSTPQGYGSTGGYGSSQSSQSSYGQQSSYPGYGQQPAPSSTSGSYGSSSQSSSYGQPQSGSYSQQPSYGGQQQSYGQQQSYNPPQGYGQQNQYNSSSGGGGGGGGGGNYGQDQSSMSSGGGSGGGYGNQDQSGGGGSGGYGQQDRGGRGRGGSGGGGGGGGGGYNRSSGGYEPRGRGGGRGGRGGMGGSDRGGFNKFGGPRDQGSRHDSEQDNSDNNTIFVQGLGENVTIESVADYFKQIGIIKTNKKTGQPMINLYTDRETGKLKGEATVSFDDPPSAKAAIDWFDGKEFSGNPIKVSFATRRADFNRGGGNGRGGRGRGGPMGRGGYGGGGSGGGGRGGFPSGGGGGGGQQRAGDWKCPNPTCENMNFSWRNECNQCKAPKPDGPGGGPGGSHMGGNYGDDRRGGRGGAIAARNAYLRKKIARLKKDNLQLERDEQNLEKIIANLRDEIARLENEVASHEQASIYPYDVPDYAGAPGSAGSAAGSGASNFTQFVLVDNGGTGDVTVAPSNFANGIAEWISSNSRSQAYKVTCSVRQSSAQNRKYTIKVEVPKGAWRSYLNMELTIPIFATNSDCELIVKAMQGLLKDGNPIPSAIAANSGIYGADYKDDDDKGAPGSAGSAAGSGACPVPLQLPPLERLTLDDKKPLNTLISATGLWMSRTGTIHKIKHHEVSRSKIYIEMACGDHLVVNNSRSSRTARALRHHKYRKTCKRCRVSDEDLNKFLTKANEDQTSVKVKVVSAPTRTKKAMPKSVARAPKPLENTEAAQAQPSGSKFSPAIPVSTQESVSVPASVSTSISSISTGATASALVKGNTNPITSMSAPVQASAPALTKSQTDRLEVLLNPKDEISLNSGKPFRELESELLSRRKKDLQQIYAEERENYLGKLEREITRFFVDRGFLEIKSPILIPLEYIERMGIDNDTELSKQIFRVDKNFCLRPMLAPNLANYLRKLDRALPDPIKIFEIGPCYRKESDGKEHLEEFTMLNFCQMGSGCTRENLESIITDFLNHLGIDFKIVGDSCMVFGDTLDVMHGDLELSSAVVGPIPLDREWGIDKPWIGAGFGLERLLKVKHDFKNIKRAARSESYYNGISTNL

SEQ ID NO: 617 - DNA, 3843 bp, Artificial Sequence
  Description of Artificial Sequence: Synthetic polynucleotide
  TOM20::FUS::SYNZIP4::lambdaN22::CbzRS
atggtgggtcggaacagcgccatcgccgccggtgtatgcggggcccttttcattgggtactgcatctacttcgaccgcaaaagacgaagtgaccccaacttcaagaacaggcttcgagaacgaagaaagaaacagaagcttgccaaggagagagctgggctttccaagttacctgaccttaaagatgctgaagctgttcagaaattcttcatggcctcaaacgattatacccaacaagcaacccaaagctatggggcctaccccacccagcccgggcagggctattcccagcagagcagtcagccctacggacagcagagttacagtggttatagccagtccacggacacttcaggatatggccagagcagctattcttcttatggccagagccagaacacaggctatggaactcagtcaactccccagggatatggctcgactggcggctatggcagtagccagagctcccaatcgtcttacgggcagcagtcctcctaccctggctatggccagcagccagctcccagcagcacctcgggaagttacggtagcagttctcagagcagcagctatgggcagccccagagtgggagctacagccagcagcctagctatggtggacagcagcaaagctatggacagcagcaaagctataatccccctcagggctatggacagcagaaccagtacaacagcagcagtggtggtggaggtggaggtggaggtggaggtaactatggccaagatcaatcctccatgagtagtggtggtggcagtggtggcggttatggcaatcaagaccagagtggtggaggtggcagcggtggctatggacagcaggaccgtggaggccgcggcaggggtggcagtggtggcggcggcggcggcggcggtggtggttacaaccgcagcagtggtggctatgaacccagaggtcgtggaggtggccgtggaggcagaggtggcatgggcggaagtgaccgtggtggcttcaataaatttggtggccctcgggaccaaggatcacgtcatgactccgaacaggataattcagacaacaacaccatctttgtgcaaggcctgggtgagaatgttacaattgagtctgtggctgattacttcaagcagattggtattattaagacaaacaagaaaacgggacagcccatgattaatttgtacacagacagggaaactggcaagctgaagggagaggcaacggtctcttttgatgacccaccttcagctaaagcagctattgactggtttgatggtaaagaattctccggaaatcctatcaaggtctcatttgctactcgccgggcagactttaatcggggtggtggcaatggtcgtggaggccgagggcgaggaggacccatgggccgtggaggctatggaggtggtggcagtggtggtggtggccgaggaggatttcccagtggaggtggtggcggtggaggacagcagcgagctggtgactggaagtgtcctaatcccacctgtgagaatatgaacttctcttggaggaatgaatgcaaccagtgtaaggcccctaaaccagatggcccaggagggggaccaggtggctctcacatggggggtaactacggggatgatcgtcgtggtggcagaggaggcgcgatcgcacaaaaggtggctgaactgaaaaatagagtggccgtgaagctgaaccggaacgagcagctgaagaacaaggtggaagagctgaagaacagaaacgcctacctgaagaatgagctggccaccctggaaaacgaggtggccagactggaaaacgacgtggccgagttaatcgcaggagcaccaggaagtgctggttctgctgctggtagtggagcatcgatagagcagaagctgatctcagaggaggacctgctagccaccatggacgcacaaacacgacgacgtgagcgtcgcgctgagaaacaagctcaatggaaagctgcaaacccaccgctcgacggagccggagctggcgctggagctggagccggagctggcggtctagccaccatggacgcacaaacacgacgacgtgagcgtcgcgctgagaaacaagctcaatggaaagctgcaaacccaccgctcgacggagccggagctggcgctggagctggagccggagctggcggtctagccaccatggacgcacaaacacgacgacgtgagcgtcgcgctgagaaacaagctcaatggaaagctgcaaacccaccgctcgacggagccggagctggcgctggagctggagccggagctggcggtctagccaccatggacgcacaaacacgacgacgtgagcgtcgcgctgagaaacaagctcaatggaaagctgcaaacccaccgctcgagtctagagggcccgttggtgctcctggttcagcaggaagcgcagcaggatcaggtgcgtgcccggtgccgctgcagctgccgccgctggaacgcctgaccctggatgacaaaaaaccgctgaataccctgatctctgctactggtctgtggatgagtcgtaccggaaccattcataaaatcaaacaccacgaggttagccgttcgaaaatctatattgagatggcgtgtggcgatcatctggttgtgaacaatagccgctcttctcgtacagcacgtgcactgcgtcaccacaaatatcgtaaaacctgtaaacgttgccgtgtgtccgatgaggatctgaacaaattcctgacaaaagccaatgaggaccaaacaagcgtgaaagtgaaagtcgttagcgctcctacccgtactaaaaaagcaatgccgaaatccgttgctcgtgcccctaaaccactggaaaacactgaagcagcacaggcacagccgtctggaagcaaattctctccggccattcctgtttctacccaggagtccgtttctgttccagcaagtgtgagcaccagcattagcagtattagcaccggtgccaccgctagcgccctggttaaaggcaataccaatccgattacaagcatgtctgccccggttcaagcatcagctccagcactgacaaaatcccaaaccgatcgtctggaggttctgctgaatccgaaagacgaaatcagcctgaattccggcaaaccgtttcgtgaactggagagcgaactgctgtcacgtcgtaaaaaagacctgcaacaaatctatgccgaagaacgtgagaactatctggggaaactggaacgtgaaatcacccgctttttcgtggatcgtggctttctggagatcaaatccccgattctgattcctctggagtatatcgagcgtatgggcatcgacaatgataccgaactgagcaaacaaattttccgtgtggataaaaacttctgtctgcgccctatgcttgcaccaaatctgatgaactatggacgcaaactggaccgtgccctgcctgatcctatcaaaatcttcgagatcggcccgtgttatcgtaaagagtccgacggtaaagaacatctggaggagtttaccatgctgaactttacacaaatgggttcaggttgtactcgtgagaacctggaaagcatcatcaccgattttctgaaccacctgggcattgacttcaaaattgtgggcgacagctgtatggtgtatggcgacaccctggatgtcatgcacggcgacctggaactgtctagtgccgttgttggaccaattccgctggaccgtgagtggggtatcgacaaaccgtggatcggagcaggattcggtctggaacgcctgctgaaagtgaaacacgacttcaaaaacatcaaacgtgccgcccgttctgaatcgtattataacgggatctctacgaacctgtaa

SEQ ID NO: 618 - protein, 1280 aa, Artificial Sequence
  Description of Artificial Sequence: Synthetic polypeptide
  TOM20::FUS::SYNZIP4::lambdaN22::CbzRS
MVGRNSAIAAGVCGALFIGYCIYFDRKRRSDPNFKNRLRERRKKQKLAKERAGLSKLPDLKDAEAVQKFFMASNDYTQQATQSYGAYPTQPGQGYSQQSSQPYGQQSYSGYSQSTDTSGYGQSSYSSYGQSQNTGYGTQSTPQGYGSTGGYGSSQSSQSSYGQQSSYPGYGQQPAPSSTSGSYGSSSQSSSYGQPQSGSYSQQPSYGGQQQSYGQQQSYNPPQGYGQQNQYNSSSGGGGGGGGGGNYGQDQSSMSSGGGSGGGYGNQDQSGGGGSGGYGQQDRGGRGRGGSGGGGGGGGGGYNRSSGGYEPRGRGGGRGGRGGMGGSDRGGFNKFGGPRDQGSRHDSEQDNSDNNTIFVQGLGENVTIESVADYFKQIGIIKTNKKTGQPMINLYTDRETGKLKGEATVSFDDPPSAKAAIDWFDGKEFSGNPIKVSFATRRADFNRGGGNGRGGRGRGGPMGRGGYGGGGSGGGGRGGFPSGGGGGGGQQRAGDWKCPNPTCENMNFSWRNECNQCKAPKPDGPGGGPGGSHMGGNYGDDRRGGRGGAIAQKVAELKNRVAVKLNRNEQLKNKVEELKNRNAYLKNELATLENEVARLENDVAELIAGAPGSAGSAAGSGASIEQKLISEEDLLATMDAQTRRRERRAEKQAQWKAANPPLDGAGAGAGAGAGAGGLATMDAQTRRRERRAEKQAQWKAANPPLDGAGAGAGAGAGAGGLATMDAQTRRRERRAEKQAQWKAANPPLDGAGAGAGAGAGAGGLATMDAQTRRRERRAEKQAQWKAANPPLESRGPVGAPGSAGSAAGSGACPVPLQLPPLERLTLDDKKPLNTLISATGLWMSRTGTIHKIKHHEVSRSKIYIEMACGDHLVVNNSRSSRTARALRHHKYRKTCKRCRVSDEDLNKFLTKANEDQTSVKVKVVSAPTRTKKAMPKSVARAPKPLENTEAAQAQPSGSKFSPAIPVSTQESVSVPASVSTSISSISTGATASALVKGNTNPITSMSAPVQASAPALTKSQTDRLEVLLNPKDEISLNSGKPFRELESELLSRRKKDLQQIYAEERENYLGKLEREITRFFVDRGFLEIKSPILIPLEYIERMGIDNDTELSKQIFRVDKNFCLRPMLAPNLMNYGRKLDRALPDPIKIFEIGPCYRKESDGKEHLEEFTMLNFTQMGSGCTRENLESIITDFLNHLGIDFKIVGDSCMVYGDTLDVMHGDLELSSAVVGPIPLDREWGIDKPWIGAGFGLERLLKVKHDFKNIKRAARSESYYNGISTNL

SEQ ID NO: 619 - DNA, 3759 bp, Artificial Sequence
  Description of Artificial Sequence: Synthetic polynucleotide
  EBAG91-29::FUS::SYNZIP4::4xlambdaN22::IFRS1
atggccatcacccagtttcggttatttaaattttgtacctgcctagcaacagtattctcattcctaaagagattaatatgcagatctggagcacccggctccgccggctccgccgccggctccggcatggcctcaaacgattatacccaacaagcaacccaaagctatggggcctaccccacccagcccgggcagggctattcccagcagagcagtcagccctacggacagcagagttacagtggttatagccagtccacggacacttcaggatatggccagagcagctattcttcttatggccagagccagaacacaggctatggaactcagtcaactccccagggatatggctcgactggcggctatggcagtagccagagctcccaatcgtcttacgggcagcagtcctcctaccctggctatggccagcagccagctcccagcagcacctcgggaagttacggtagcagttctcagagcagcagctatgggcagccccagagtgggagctacagccagcagcctagctatggtggacagcagcaaagctatggacagcagcaaagctataatccccctcagggctatggacagcagaaccagtacaacagcagcagtggtggtggaggtggaggtggaggtggaggtaactatggccaagatcaatcctccatgagtagtggtggtggcagtggtggcggttatggcaatcaagaccagagtggtggaggtggcagcggtggctatggacagcaggaccgtggaggccgcggcaggggtggcagtggtggcggcggcggcggcggcggtggtggttacaaccgcagcagtggtggctatgaacccagaggtcgtggaggtggccgtggaggcagaggtggcatgggcggaagtgaccgtggtggcttcaataaatttggtggccctcgggaccaaggatcacgtcatgactccgaacaggataattcagacaacaacaccatctttgtgcaaggcctgggtgagaatgttacaattgagtctgtggctgattacttcaagcagattggtattattaagacaaacaagaaaacgggacagcccatgattaatttgtacacagacagggaaactggcaagctgaagggagaggcaacggtctcttttgatgacccaccttcagctaaagcagctattgactggtttgatggtaaagaattctccggaaatcctatcaaggtctcatttgctactcgccgggcagactttaatcggggtggtggcaatggtcgtggaggccgagggcgaggaggacccatgggccgtggaggctatggaggtggtggcagtggtggtggtggccgaggaggatttcccagtggaggtggtggcggtggaggacagcagcgagctggtgactggaagtgtcctaatcccacctgtgagaatatgaacttctcttggaggaatgaatgcaaccagtgtaaggcccctaaaccagatggcccaggagggggaccaggtggctctcacatggggggtaactacggggatgatcgtcgtggtggcagaggtggtgcgatcgcacaaaaggtggctgaactgaaaaatagagtggccgtgaagctgaaccggaacgagcagctgaagaacaaggtggaagagctgaagaacagaaacgcctacctgaagaatgagctggccaccctggaaaacgaggtggccagactggaaaacgacgtggccgagttaatcgcaggagcaccaggaagtgctggttctgctgctggtagtggagcatcgatagagcagaagctgatctcagaggaggacctgctagccaccatggacgcacaaacacgacgacgtgagcgtcgcgctgagaaacaagctcaatggaaagctgcaaacccaccgctcgacggagccggagctggcgctggagctggagccggagctggcggtctagccaccatggacgcacaaacacgacgacgtgagcgtcgcgctgagaaacaagctcaatggaaagctgcaaacccaccgctcgacggagccggagctggcgctggagctggagccggagctggcggtctagccaccatggacgcacaaacacgacgacgtgagcgtcgcgctgagaaacaagctcaatggaaagctgcaaacccaccgctcgacggagccggagctggcgctggagctggagccggagctggcggtctagccaccatggacgcacaaacacgacgacgtgagcgtcgcgctgagaaacaagctcaatggaaagctgcaaacccaccgctcgagtctagagggcccgttggtgctcctggttcagcaggaagcgcagcaggatcaggtgcgtgcccggtgccgctgcagctgccgccgctggaacgcctgaccctggatgacaaaaaaccgctgaataccctgatctctgctactggtctgtggatgagtcgtaccggaaccattcataaaatcaaacaccacgaggttagccgttcgaaaatctatattgagatggcgtgtggcgatcatctggttgtgaacaatagccgctcttctcgtacagcacgtgcactgcgtcaccacaaatatcgtaaaacctgtaaacgttgccgtgtgtccgatgaggatctgaacaaattcctgacaaaagccaatgaggaccaaacaagcgtgaaagtgaaagtcgttagcgctcctacccgtactaaaaaagcaatgccgaaatccgttgctcgtgcccctaaaccactggaaaacactgaagcagcacaggcacagccgtctggaagcaaattctctccggccattcctgtttctacccaggagtccgtttctgttccagcaagtgtgagcaccagcattagcagtattagcaccggtgccaccgctagcgccctggttaaaggcaataccaatccgattacaagcatgtctgccccggttcaagcatcagctccagcactgacaaaatcccaaaccgatcgtctggaggttctgctgaatccgaaagacgaaatcagcctgaattccggcaaaccgtttcgtgaactggagagcgaactgctgtcacgtcgtaaaaaagacctgcaacaaatctatgccgaagaacgtgagaactatctggggaaactggaacgtgaaatcacccgctttttcgtggatcgtggctttctggagatcaaatccccgattctgattcctctggagtatatcgagcgtatgggcatcgacaatgataccgaactgagcaaacaaattttccgtgtggataaaaacttctgtctgcgccctatgcttgcaccaaatatgctgaactatagccgcaaactggaccgtgccctgcctgatcctatcaaaatcttcgagatcggcccgtgttatcgtaaagagtccgacggtaaagaacatctggaggagtttaccatgctgtcttttatgcaaatgggttcaggttgtactcgtgagaacctggaaagcatcatcaccgattttctgaaccacctgggcattgacttcaaaattgtgggcgacagctgtatggtgtatggcgacaccctggatgtcatgcacggcgacctggaactgtctagtgccgttgttggaccaattccgctggaccgtgagtggggtatcgacaaaccgtggatcggagcaggattcggtctggaacgcctgctgaaagtgaaacacgacttcaaaaacatcaaacgtgccgcccgttctgaatcgtattataacgggatctctacgaacctgtaa

SEQ ID NO: 620 - protein, 1252 aa, Artificial Sequence
  Description of Artificial Sequence: Synthetic polypeptide
  EBAG91-29::FUS::SYNZIP4::4xlambdaN22::IFRS1
MAITQFRLFKFCTCLATVFSFLKRLICRSGAPGSAGSAAGSGMASNDYTQQATQSYGAYPTQPGQGYSQQSSQPYGQQSYSGYSQSTDTSGYGQSSYSSYGQSQNTGYGTQSTPQGYGSTGGYGSSQSSQSSYGQQSSYPGYGQQPAPSSTSGSYGSSSQSSSYGQPQSGSYSQQPSYGGQQQSYGQQQSYNPPQGYGQQNQYNSSSGGGGGGGGGGNYGQDQSSMSSGGGSGGGYGNQDQSGGGGSGGYGQQDRGGRGRGGSGGGGGGGGGGYNRSSGGYEPRGRGGGRGGRGGMGGSDRGGFNKFGGPRDQGSRHDSEQDNSDNNTIFVQGLGENVTIESVADYFKQIGIIKTNKKTGQPMINLYTDRETGKLKGEATVSFDDPPSAKAAIDWFDGKEFSGNPIKVSFATRRADFNRGGGNGRGGRGRGGPMGRGGYGGGGSGGGGRGGFPSGGGGGGGQQRAGDWKCPNPTCENMNFSWRNECNQCKAPKPDGPGGGPGGSHMGGNYGDDRRGGRGGAIAQKVAELKNRVAVKLNRNEQLKNKVEELKNRNAYLKNELATLENEVARLENDVAELIAGAPGSAGSAAGSGASIEQKLISEEDLLATMDAQTRRRERRAEKQAQWKAANPPLDGAGAGAGAGAGAGGLATMDAQTRRRERRAEKQAQWKAANPPLDGAGAGAGAGAGAGGLATMDAQTRRRERRAEKQAQWKAANPPLDGAGAGAGAGAGAGGLATMDAQTRRRERRAEKQAQWKAANPPLESRGPVGAPGSAGSAAGSGACPVPLQLPPLERLTLDDKKPLNTLISATGLWMSRTGTIHKIKHHEVSRSKIYIEMACGDHLVVNNSRSSRTARALRHHKYRKTCKRCRVSDEDLNKFLTKANEDQTSVKVKVVSAPTRTKKAMPKSVARAPKPLENTEAAQAQPSGSKFSPAIPVSTQESVSVPASVSTSISSISTGATASALVKGNTNPITSMSAPVQASAPALTKSQTDRLEVLLNPKDEISLNSGKPFRELESELLSRRKKDLQQIYAEERENYLGKLEREITRFFVDRGFLEIKSPILIPLEYIERMGIDNDTELSKQIFRVDKNFCLRPMLAPNMLNYSRKLDRALPDPIKIFEIGPCYRKESDGKEHLEEFTMLSFMQMGSGCTRENLESIITDFLNHLGIDFKIVGDSCMVYGDTLDVMHGDLELSSAVVGPIPLDREWGIDKPWIGAGFGLERLLKVKHDFKNIKRAARSESYYNGISTNL

SEQ ID NO: 621 - DNA, 3798 bp, Artificial Sequence
  Description of Artificial Sequence: Synthetic polynucleotide
  TOM20::FUS::SYNZIP3::4xlambdaN22::PylRS(AA)
atggtgggtcggaacagcgccatcgccgccggtgtatgcggggcccttttcattgggtactgcatctacttcgaccgcaaaagacgaagtgaccccaacttcaagaacaggcttcgagaacgaagaaagaaacagaagcttgccaaggagagagctgggctttccaagttacctgaccttaaagatgctgaagctgttcagaaattcttcatggcctcaaacgattatacccaacaagcaacccaaagctatggggcctaccccacccagcccgggcagggctattcccagcagagcagtcagccctacggacagcagagttacagtggttatagccagtccacggacacttcaggatatggccagagcagctattcttcttatggccagagccagaacacaggctatggaactcagtcaactccccagggatatggctcgactggcggctatggcagtagccagagctcccaatcgtcttacgggcagcagtcctcctaccctggctatggccagcagccagctcccagcagcacctcgggaagttacggtagcagttctcagagcagcagctatgggcagccccagagtgggagctacagccagcagcctagctatggtggacagcagcaaagctatggacagcagcaaagctataatccccctcagggctatggacagcagaaccagtacaacagcagcagtggtggtggaggtggaggtggaggtggaggtaactatggccaagatcaatcctccatgagtagtggtggtggcagtggtggcggttatggcaatcaagaccagagtggtggaggtggcagcggtggctatggacagcaggaccgtggaggccgcggcaggggtggcagtggtggcggcggcggcggcggcggtggtggttacaaccgcagcagtggtggctatgaacccagaggtcgtggaggtggccgtggaggcagaggtggcatgggcggaagtgaccgtggtggcttcaataaatttggtggccctcgggaccaaggatcacgtcatgactccgaacaggataattcagacaacaacaccatctttgtgcaaggcctgggtgagaatgttacaattgagtctgtggctgattacttcaagcagattggtattattaagacaaacaagaaaacgggacagcccatgattaatttgtacacagacagggaaactggcaagctgaagggagaggcaacggtctcttttgatgacccaccttcagctaaagcagctattgactggtttgatggtaaagaattctccggaaatcctatcaaggtctcatttgctactcgccgggcagactttaatcggggtggtggcaatggtcgtggaggccgagggcgaggaggacccatgggccgtggaggctatggaggtggtggcagtggtggtggtggccgaggaggatttcccagtggaggtggtggcggtggaggacagcagcgagctggtgactggaagtgtcctaatcccacctgtgagaatatgaacttctcttggaggaatgaatgcaaccagtgtaaggcccctaaaccagatggcccaggagggggaccaggtggctctcacatggggggtaactacggggatgatcgtcgtggtggcagaggaggcgcgatcgcaaatgaggtgaccaccctggaaaacgacgccgccttcatcgagaacgagaacgcctacctggaaaaagagatcgccagactgagaaaggaaaaggccgctctgcggaacagactggcccacaagaagggagcaccaggaagtgctggttctgctgctggtagtggagcatcgatagagcagaagctgatctcagaggaggacctgctagccaccatggacgcacaaacacgacgacgtgagcgtcgcgctgagaaacaagctcaatggaaagctgcaaacccaccgctcgacggagccggagctggcgctggagctggagccggagctggcggtctagccaccatggacgcacaaacacgacgacgtgagcgtcgcgctgagaaacaagctcaatggaaagctgcaaacccaccgctcgacggagccggagctggcgctggagctggagccggagctggcggtctagccaccatggacgcacaaacacgacgacgtgagcgtcgcgctgagaaacaagctcaatggaaagctgcaaacccaccgctcgacggagccggagctggcgctggagctggagccggagctggcggtctagccaccatggacgcacaaacacgacgacgtgagcgtcgcgctgagaaacaagctcaatggaaagctgcaaacccaccgctcgagtctagagggcccgttggtgctcctggttcagcaggaagcgcagcaggatcaggtgcgtgcccggtgccgctgcagctgccgccgctggaacgcctgaccctggatgacaaaaaaccgctgaataccctgatctctgctactggtctgtggatgagtcgtaccggaaccattcataaaatcaaacaccacgaggttagccgttcgaaaatctatattgagatggcgtgtggcgatcatctggttgtgaacaatagccgctcttctcgtacagcacgtgcactgcgtcaccacaaatatcgtaaaacctgtaaacgttgccgtgtgtccgatgaggatctgaacaaattcctgacaaaagccaatgaggaccaaacaagcgtgaaagtgaaagtcgttagcgctcctacccgtactaaaaaagcaatgccgaaatccgttgctcgtgcccctaaaccactggaaaacactgaagcagcacaggcacagccgtctggaagcaaattctctccggccattcctgtttctacccaggagtccgtttctgttccagcaagtgtgagcaccagcattagcagtattagcaccggtgccaccgctagcgccctggttaaaggcaataccaatccgattacaagcatgtctgccccggttcaagcatcagctccagcactgacaaaatcccaaaccgatcgtctggaggttctgctgaatccgaaagacgaaatcagcctgaattccggcaaaccgtttcgtgaactggagagcgaactgctgtcacgtcgtaaaaaagacctgcaacaaatctatgccgaagaacgtgagaactatctggggaaactggaacgtgaaatcacccgctttttcgtggatcgtggctttctggagatcaaatccccgattctgattcctctggagtatatcgagcgtatgggcatcgacaatgataccgaactgagcaaacaaattttccgtgtggataaaaacttctgtctgcgccctatgctggcaccaaatctgtataactatctgcgcaaactggaccgtgccctgcctgatcctatcaaaatcttcgagatcggcccgtgttatcgtaaagagtccgacggtaaagaacatctggaggagtttaccatgctggcctttgcccaaatgggttcaggttgtactcgtgagaacctggaaagcatcatcaccgattttctgaaccacctgggcattgacttcaaaattgtgggcgacagctgtatggtgtatggcgacaccctggatgtcatgcacggcgacctggaactgtctagtgccgttgttggaccaattccgctggaccgtgagtggggtatcgacaaaccgtggatcggagcaggattcggtctggaacgcctgctgaaagtgaaacacgacttcaaaaacatcaaacgtgccgcccgttctgaatcgtattataacgggatctctacgaacctgtaa

SEQ ID NO: 622 - protein, 1265 aa, Artificial Sequence
  Description of Artificial Sequence: Synthetic polypeptide
  TOM20::FUS::SYNZIP3::4xlambdaN22::PylRS(AA)
MVGRNSAIAAGVCGALFIGYCIYFDRKRRSDPNFKNRLRERRKKQKLAKERAGLSKLPDLKDAEAVQKFFMASNDYTQQATQSYGAYPTQPGQGYSQQSSQPYGQQSYSGYSQSTDTSGYGQSSYSSYGQSQNTGYGTQSTPQGYGSTGGYGSSQSSQSSYGQQSSYPGYGQQPAPSSTSGSYGSSSQSSSYGQPQSGSYSQQPSYGGQQQSYGQQQSYNPPQGYGQQNQYNSSSGGGGGGGGGGNYGQDQSSMSSGGGSGGGYGNQDQSGGGGSGGYGQQDRGGRGRGGSGGGGGGGGGGYNRSSGGYEPRGRGGGRGGRGGMGGSDRGGFNKFGGPRDQGSRHDSEQDNSDNNTIFVQGLGENVTIESVADYFKQIGIIKTNKKTGQPMINLYTDRETGKLKGEATVSFDDPPSAKAAIDWFDGKEFSGNPIKVSFATRRADFNRGGGNGRGGRGRGGPMGRGGYGGGGSGGGGRGGFPSGGGGGGGQQRAGDWKCPNPTCENMNFSWRNECNQCKAPKPDGPGGGPGGSHMGGNYGDDRRGGRGGAIANEVTTLENDAAFIENENAYLEKEIARLRKEKAALRNRLAHKKGAPGSAGSAAGSGASIEQKLISEEDLLATMDAQTRRRERRAEKQAQWKAANPPLDGAGAGAGAGAGAGGLATMDAQTRRRERRAEKQAQWKAANPPLDGAGAGAGAGAGAGGLATMDAQTRRRERRAEKQAQWKAANPPLDGAGAGAGAGAGAGGLATMDAQTRRRERRAEKQAQWKAANPPLESRGPVGAPGSAGSAAGSGACPVPLQLPPLERLTLDDKKPLNTLISATGLWMSRTGTIHKIKHHEVSRSKIYIEMACGDHLVVNNSRSSRTARALRHHKYRKTCKRCRVSDEDLNKFLTKANEDQTSVKVKVVSAPTRTKKAMPKSVARAPKPLENTEAAQAQPSGSKFSPAIPVSTQESVSVPASVSTSISSISTGATASALVKGNTNPITSMSAPVQASAPALTKSQTDRLEVLLNPKDEISLNSGKPFRELESELLSRRKKDLQQIYAEERENYLGKLEREITRFFVDRGFLEIKSPILIPLEYIERMGIDNDTELSKQIFRVDKNFCLRPMLAPNLYNYLRKLDRALPDPIKIFEIGPCYRKESDGKEHLEEFTMLAFAQMGSGCTRENLESIITDFLNHLGIDFKIVGDSCMVYGDTLDVMHGDLELSSAVVGPIPLDREWGIDKPWIGAGFGLERLLKVKHDFKNIKRAARSESYYNGISTNL

SEQ ID NO: 623 - DNA, 3528 bp, Artificial Sequence
  Description of Artificial Sequence: Synthetic polynucleotide
  LCK::FUS::SYNZIP1::MCP::PylRS(AA)
atgggctgcgtgtgcagcagcaaccccgagggtaccgagctcgcctcaaacgattatacccaacaagcaacccaaagctatggggcctaccccacccagcccgggcagggctattcccagcagagcagtcagccctacggacagcagagttacagtggttatagccagtccacggacacttcaggatatggccagagcagctattcttcttatggccagagccagaacacaggctatggaactcagtcaactccccagggatatggctcgactggcggctatggcagtagccagagctcccaatcgtcttacgggcagcagtcctcctaccctggctatggccagcagccagctcccagcagcacctcgggaagttacggtagcagttctcagagcagcagctatgggcagccccagagtgggagctacagccagcagcctagctatggtggacagcagcaaagctatggacagcagcaaagctataatccccctcagggctatggacagcagaaccagtacaacagcagcagtggtggtggaggtggaggtggaggtggaggtaactatggccaagatcaatcctccatgagtagtggtggtggcagtggtggcggttatggcaatcaagaccagagtggtggaggtggcagcggtggctatggacagcaggaccgtggaggccgcggcaggggtggcagtggtggcggcggcggcggcggcggtggtggttacaaccgcagcagtggtggctatgaacccagaggtcgtggaggtggccgtggaggcagaggtggcatgggcggaagtgaccgtggtggcttcaataaatttggtggccctcgggaccaaggatcacgtcatgactccgaacaggataattcagacaacaacaccatctttgtgcaaggcctgggtgagaatgttacaattgagtctgtggctgattacttcaagcagattggtattattaagacaaacaagaaaacgggacagcccatgattaatttgtacacagacagggaaactggcaagctgaagggagaggcaacggtctcttttgatgacccaccttcagctaaagcagctattgactggtttgatggtaaagaattctccggaaatcctatcaaggtctcatttgctactcgccgggcagactttaatcggggtggtggcaatggtcgtggaggccgagggcgaggaggacccatgggccgtggaggctatggaggtggtggcagtggtggtggtggccgaggaggatttcccagtggaggtggtggcggtggaggacagcagcgagctggtgactggaagtgtcctaatcccacctgtgagaatatgaacttctcttggaggaatgaatgcaaccagtgtaaggcccctaaaccagatggcccaggagggggaccaggtggctctcacatggggggtaactacggggatgatcgtcgtggtggcagaggaggcgcgatcgcaaatctggtggcccagctggaaaacgaggtggccagcctggaaaacgagaacgaaaccctgaagaaaaagaacctgcacaagaaggacctgatcgcctacctggaaaaggaaatcgccaacctgagaaagaagatcgaggaagcatcgatatatccctatgatgtgccggattatgctggagcaccaggaagtgctggttctgctgctggtagtggagcttctaactttactcagttcgttctcgtcgacaatggcggaactggcgacgtgactgtcgccccaagcaacttcgctaacgggatcgctgaatggatcagctctaactcgcgttcacaggcttacaaagtaacctgtagcgttcgtcagagctctgcgcagaatcgcaaatacaccatcaaagtcgaggtgcctaaaggcgcctggcgttcgtacttaaatatggaactaaccattccaattttcgccacgaattccgactgcgagcttattgttaaggcaatgcaaggtctcctaaaagatggaaacccgattccctcagcaatcgcagcaaactccggcatctacggcgccgattacaaggacgatgatgacaagggagcaccaggaagtgctggttctgctgctggtagtggagcgtgcccggtgccgctgcagctgccgccgctggaacgcctgaccctggatgataaaaaaccgctgaataccctgatctctgctactggtctgtggatgagtcgtaccggaaccattcataaaatcaaacaccacgaggttagccgttcgaaaatctatattgagatggcgtgtggcgatcatctggttgtgaacaatagccgctcttctcgtacagcacgtgcactgcgtcaccacaaatatcgtaaaacctgtaaacgttgccgtgtgtccgatgaggatctgaacaaattcctgacaaaagccaatgaggaccaaacaagcgtgaaagtgaaagtcgttagcgctcctacccgtactaaaaaagcaatgccgaaatccgttgctcgtgcccctaaaccactggaaaacactgaagcagcacaggcacagccgtctggaagcaaattctctccggccattcctgtttctacccaggagtccgtttctgttccagcaagtgtgagcaccagcattagcagtattagcaccggtgccaccgctagcgccctggttaaaggcaataccaatccgattacaagcatgtctgccccggttcaagcatcagctccagcactgacaaaatcccaaaccgatcgtctggaggttctgctgaatccgaaagacgaaatcagcctgaattccggcaaaccgtttcgtgaactggagagcgaactgctgtcacgtcgtaaaaaagacctgcaacaaatctatgccgaagaacgtgagaactatctggggaaactggaacgtgaaatcacccgctttttcgtggatcgtggctttctggagatcaaatccccgattctgattcctctggagtatatcgagcgtatgggcatcgacaatgataccgaactgagcaaacaaattttccgtgtggataaaaacttctgtctgcgccctatgctggcaccaaatctgtataactatctgcgcaaactggaccgtgccctgcctgatcctatcaaaatcttcgagatcggcccgtgttatcgtaaagagtccgacggtaaagaacatctggaggagtttaccatgctggcctttgcccaaatgggttcaggttgtactcgtgagaacctggaaagcatcatcaccgattttctgaaccacctgggcattgacttcaaaattgtgggcgacagctgtatggtgtatggcgacaccctggatgtcatgcacggcgacctggaactgtctagtgccgttgttggaccaattccgctggaccgtgagtggggtatcgacaaaccgtggatcggagcaggattcggtctggaacgcctgctgaaagtgaaacacgacttcaaaaacatcaaacgtgccgcccgttctgaatcgtattataacgggatctctacgaacctgtaa

SEQ ID NO: 624 - protein, 1175 aa, Artificial Sequence
  Description of Artificial Sequence: Synthetic polypeptide
  LCK::FUS::SYNZIP1::MCP::PylRS(AA)
MGCVCSSNPEGTELASNDYTQQATQSYGAYPTQPGQGYSQQSSQPYGQQSYSGYSQSTDTSGYGQSSYSSYGQSQNTGYGTQSTPQGYGSTGGYGSSQSSQSSYGQQSSYPGYGQQPAPSSTSGSYGSSSQSSSYGQPQSGSYSQQPSYGGQQQSYGQQQSYNPPQGYGQQNQYNSSSGGGGGGGGGGNYGQDQSSMSSGGGSGGGYGNQDQSGGGGSGGYGQQDRGGRGRGGSGGGGGGGGGGYNRSSGGYEPRGRGGGRGGRGGMGGSDRGGFNKFGGPRDQGSRHDSEQDNSDNNTIFVQGLGENVTIESVADYFKQIGIIKTNKKTGQPMINLYTDRETGKLKGEATVSFDDPPSAKAAIDWFDGKEFSGNPIKVSFATRRADFNRGGGNGRGGRGRGGPMGRGGYGGGGSGGGGRGGFPSGGGGGGGQQRAGDWKCPNPTCENMNFSWRNECNQCKAPKPDGPGGGPGGSHMGGNYGDDRRGGRGGAIANLVAQLENEVASLENENETLKKKNLHKKDLIAYLEKEIANLRKKIEEASIYPYDVPDYAGAPGSAGSAAGSGASNFTQFVLVDNGGTGDVTVAPSNFANGIAEWISSNSRSQAYKVTCSVRQSSAQNRKYTIKVEVPKGAWRSYLNMELTIPIFATNSDCELIVKAMQGLLKDGNPIPSAIAANSGIYGADYKDDDDKGAPGSAGSAAGSGACPVPLQLPPLERLTLDDKKPLNTLISATGLWMSRTGTIHKIKHHEVSRSKIYIEMACGDHLVVNNSRSSRTARALRHHKYRKTCKRCRVSDEDLNKFLTKANEDQTSVKVKVVSAPTRTKKAMPKSVARAPKPLENTEAAQAQPSGSKFSPAIPVSTQESVSVPASVSTSISSISTGATASALVKGNTNPITSMSAPVQASAPALTKSQTDRLEVLLNPKDEISLNSGKPFRELESELLSRRKKDLQQIYAEERENYLGKLEREITRFFVDRGFLEIKSPILIPLEYIERMGIDNDTELSKQIFRVDKNFCLRPMLAPNLYNYLRKLDRALPDPIKIFEIGPCYRKESDGKEHLEEFTMLAFAQMGSGCTRENLESIITDFLNHLGIDFKIVGDSCMVYGDTLDVMHGDLELSSAVVGPIPLDREWGIDKPWIGAGFGLERLLKVKHDFKNIKRAARSESYYNGISTNL

SEQ ID NO: 625 - DNA, 4530 bp, Artificial Sequence
  Description of Artificial Sequence: Synthetic polynucleotide
  TOM20::EWSR1::SYNZIP4::4xlambdaN22::SYNZIP4::PylRS(AF)
atggtgggtcggaacagcgccatcgccgccggtgtatgcggggcccttttcattgggtactgcatctacttcgaccgcaaaagacgaagtgaccccaacttcaagaacaggcttcgagaacgaagaaagaaacagaagcttgccaaggagagagctgggctttccaagttacctgaccttaaagatgctgaagctgttcagaagttcttcatggcgtccacggattacagtacctatagccaagctgcagcgcagcagggctacagtgcttacaccgcccagcccactcaaggatatgcacagaccacccaggcatatgggcaacaaagctatggaacctatggacagcccactgatgtcagctatacccaggctcagaccactgcaacctatgggcagaccgcctatgcaacttcttatggacagcctcccactggttatactactccaactgccccccaggcatacagccagcctgtccaggggtatggcactggtgcttatgataccaccactgctacagtcaccaccacccaggcctcctatgcagctcagtctgcatatggcactcagcctgcttatccagcctatgggcagcagccagcagccactgcacctacaagaccgcaggatggaaacaagcccactgagactagtcaacctcaatctagcacagggggttacaaccagcccagcctaggatatggacagagtaactacagttatccccaggtacctgggagctaccccatgcagccagtcactgcacctccatcctaccctcctaccagctattcctctacacagccgactagttatgatcagagcagttactctcagcagaacacctatgggcaaccgagcagctatggacagcagagtagctatggtcaacaaagcagctatgggcagcagcctcccactagttacccaccccaaactggatcctacagccaagctccaagtcaatatagccaacagagcagcagctacgggcagcagagttcattccgacaggaccaccccagtagcatgggtgtttatgggcaggagtctggaggattttccggaccaggagagaaccggagcatgagtggccctgataaccggggcaggggaagagggggatttgatcgtggaggcatgagcagaggtgggcggggaggaggacgcggtggaatgggcagcgctggagagcgaggtggcttcaataagcctggtggacccatggatgaaggaccagatcttgatctaggcccacctgtagatccagatgaagactctgacaacagtgcaatttatgtacaaggattaaatgacagtgtgactctagatgatctggcagacttctttaagcagtgtggggttgttaagatgaacaagagaactgggcaacccatgatccacatctacctggacaaggaaacaggaaagcccaaaggcgatgccacagtgtcctatgaagacccacctactgccaaggctgccgtggaatggtttgatgggaaagattttcaagggagcaaacttaaagtctcccttgctcggaagaagcctccaatgaacagtatgcggggtggtctgccaccccgtgagggcagaggcatgccaccaccactccgtggaggtccaggaggcccaggaggtcctgggggacccatgggtcgcatgggaggccgtggaggagatagaggaggcttccctccaagaggaccccggggttcccgagggaacccctctggaggaggaaacgtccagcaccgagctggagactggcagtgtcccaatccgggttgtggaaaccagaacttcgcctggagaacagagtgcaaccagtgtaaggccccaaagcctgaaggcttcctcccgccaccctttccgcccccgggtggtgatcgtggcagaggtggccctggtggcatgcggggaggaagaggtggcctcatggatcgtggtggtcccggtggaatgttcagaggtggccgtggtggagacagaggtggcttccgtggtggccggggcatggaccgaggtggctttggtggaggaagacgaggtggccctggggggccccctggacctttgatggaacaggcgatcgcacaaaaggtggctgaactgaaaaatagagtggccgtgaagctgaaccggaacgagcagctgaagaacaaggtggaagagctgaagaacagaaacgcctacctgaagaatgagctggccaccctggaaaacgaggtggccagactggaaaacgacgtggccgagggagcaccaggaagtgctggttctgctgctggtagtggagagcagaagctgatctcagaggaggacctgctagccaccatggacgcacaaacacgacgacgtgagcgtcgcgctgagaaacaagctcaatggaaagctgcaaacccaccgctcgacggagccggagctggcgctggagctggagccggagctggcggtctagccaccatggacgcacaaacacgacgacgtgagcgtcgcgctgagaaacaagctcaatggaaagctgcaaacccaccgctcgacggagccggagctggcgctggagctggagccggagctggcggtctagccaccatggacgcacaaacacgacgacgtgagcgtcgcgctgagaaacaagctcaatggaaagctgcaaacccaccgctcgacggagccggagctggcgctggagctggagccggagctggcggtctagccaccatggacgcacaaacacgacgacgtgagcgtcgcgctgagaaacaagctcaatggaaagctgcaaacccaccgctcgagtctagagggcccgtttctgggctaagcggtgctccggggtcagccggaagtgcagcaggatcaggtcaaaaggtggctgaactgaaaaatagagtggccgtgaagctgaaccggaacgagcagctgaagaacaaggtggaagagctgaagaacagaaacgcctacctgaagaatgagctggccaccctggaaaacgaggtggccagactggaaaacgacgtggccgagggcaagcctattcccaaccccctgctgggcctggatagcaccggagcaccaggaagtgctggttctgctgctggtagtggagcgtgcccggtgccgctgcagctgccgccgctggaacgcctgaccctggatgacaaaaaaccgctgaataccctgatctctgctactggtctgtggatgagtcgtaccggaaccattcataaaatcaaacaccacgaggttagccgttcgaaaatctatattgagatggcgtgtggcgatcatctggttgtgaacaatagccgctcttctcgtacagcacgtgcactgcgtcaccacaaatatcgtaaaacctgtaaacgttgccgtgtgtccgatgaggatctgaacaaattcctgacaaaagccaatgaggaccaaacaagcgtgaaagtgaaagtcgttagcgctcctacccgtactaaaaaagcaatgccgaaatccgttgctcgtgcccctaaaccactggaaaacactgaagcagcacaggcacagccgtctggaagcaaattctctccggccattcctgtttctacccaggagtccgtttctgttccagcaagtgtgagcaccagcattagcagtattagcaccggtgccaccgctagcgccctggttaaaggcaataccaatccgattacaagcatgtctgccccggttcaagcatcagctccagcactgacaaaatcccaaaccgatcgtctggaggttctgctgaatccgaaagacgaaatcagcctgaattccggcaaaccgtttcgtgaactggagagcgaactgctgtcacgtcgtaaaaaagacctgcaacaaatctatgccgaagaacgtgagaactatctggggaaactggaacgtgaaatcacccgctttttcgtggatcgtggctttctggagatcaaatccccgattctgattcctctggagtatatcgagcgtatgggcatcgacaatgataccgaactgagcaaacaaattttccgtgtggataaaaacttctgtctgcgccctatgctagcaccaaatctggctaactatctgcgcaaactggaccgtgccctgcctgatcctatcaaaatcttcgagatcggcccgtgttatcgtaaagagtccgacggtaaagaacatctggaggagtttaccatgctgaacttttgccaaatgggttcaggttgtactcgtgagaacctggaaagcatcatcaccgattttctgaaccacctgggcattgacttcaaaattgtgggcgacagctgtatggtgtttggcgacaccctggatgtcatgcacggcgacctggaactgtctagtgccgttgtgggcccaatcccgctggatcgtgagtggggtatcgacaaaccttggatcggtgcgggttttggtctggagcgtctgctgaaagtaaaacacgacttcaagaacatcaaacgtgctgcacgttccgagtcctattacaatggtatttctactaacctgtaa

SEQ ID NO: 626 - protein, 1509 aa, Artificial Sequence
  Description of Artificial Sequence: Synthetic polypeptide
  TOM20::EWSR1::SYNZIP4::4xlambdaN22::SYNZIP4::PylRS(AF)
MVGRNSAIAAGVCGALFIGYCIYFDRKRRSDPNFKNRLRERRKKQKLAKERAGLSKLPDLKDAEAVQKFFMASTDYSTYSQAAAQQGYSAYTAQPTQGYAQTTQAYGQQSYGTYGQPTDVSYTQAQTTATYGQTAYATSYGQPPTGYTTPTAPQAYSQPVQGYGTGAYDTTTATVTTTQASYAAQSAYGTQPAYPAYGQQPAATAPTRPQDGNKPTETSQPQSSTGGYNQPSLGYGQSNYSYPQVPGSYPMQPVTAPPSYPPTSYSSTQPTSYDQSSYSQQNTYGQPSSYGQQSSYGQQSSYGQQPPTSYPPQTGSYSQAPSQYSQQSSSYGQQSSFRQDHPSSMGVYGQESGGFSGPGENRSMSGPDNRGRGRGGFDRGGMSRGGRGGGRGGMGSAGERGGFNKPGGPMDEGPDLDLGPPVDPDEDSDNSAIYVQGLNDSVTLDDLADFFKQCGVVKMNKRTGQPMIHIYLDKETGKPKGDATVSYEDPPTAKAAVEWFDGKDFQGSKLKVSLARKKPPMNSMRGGLPPREGRGMPPPLRGGPGGPGGPGGPMGRMGGRGGDRGGFPPRGPRGSRGNPSGGGNVQHRAGDWQCPNPGCGNQNFAWRTECNQCKAPKPEGFLPPPFPPPGGDRGRGGPGGMRGGRGGLMDRGGPGGMFRGGRGGDRGGFRGGRGMDRGGFGGGRRGGPGGPPGPLMEQAIAQKVAELKNRVAVKLNRNEQLKNKVEELKNRNAYLKNELATLENEVARLENDVAEGAPGSAGSAAGSGEQKLISEEDLLATMDAQTRRRERRAEKQAQWKAANPPLDGAGAGAGAGAGAGGLATMDAQTRRRERRAEKQAQWKAANPPLDGAGAGAGAGAGAGGLATMDAQTRRRERRAEKQAQWKAANPPLDGAGAGAGAGAGAGGLATMDAQTRRRERRAEKQAQWKAANPPLESRGPVSGLSGAPGSAGSAAGSGQKVAELKNRVAVKLNRNEQLKNKVEELKNRNAYLKNELATLENEVARLENDVAEGKPIPNPLLGLDSTGAPGSAGSAAGSGACPVPLQLPPLERLTLDDKKPLNTLISATGLWMSRTGTIHKIKHHEVSRSKIYIEMACGDHLVVNNSRSSRTARALRHHKYRKTCKRCRVSDEDLNKFLTKANEDQTSVKVKVVSAPTRTKKAMPKSVARAPKPLENTEAAQAQPSGSKFSPAIPVSTQESVSVPASVSTSISSISTGATASALVKGNTNPITSMSAPVQASAPALTKSQTDRLEVLLNPKDEISLNSGKPFRELESELLSRRKKDLQQIYAEERENYLGKLEREITRFFVDRGFLEIKSPILIPLEYIERMGIDNDTELSKQIFRVDKNFCLRPMLAPNLANYLRKLDRALPDPIKIFEIGPCYRKESDGKEHLEEFTMLNFCQMGSGCTRENLESIITDFLNHLGIDFKIVGDSCMVFGDTLDVMHGDLELSSAVVGPIPLDREWGIDKPWIGAGFGLERLLKVKHDFKNIKRAARSESYYNGISTNL

SEQ ID NO: 627 - DNA, 3900 bp, Artificial Sequence
  Description of Artificial Sequence: Synthetic polynucleotide
  TOM20::FUS::SYNZIP1::MCP::SYNZIP1::PylRS(AF)
atggtgggtcggaacagcgccatcgccgccggtgtatgcggggcccttttcattgggtactgcatctacttcgaccgcaaaagacgaagtgaccccaacttcaagaacaggcttcgagaacgaagaaagaaacagaagcttgccaaggagagagctgggctttccaagttacctgaccttaaagatgctgaagctgttcagaaattcttcatggcctcaaacgattatacccaacaagcaacccaaagctatggggcctaccccacccagcccgggcagggctattcccagcagagcagtcagccctacggacagcagagttacagtggttatagccagtccacggacacttcaggatatggccagagcagctattcttcttatggccagagccagaacacaggctatggaactcagtcaactccccagggatatggctcgactggcggctatggcagtagccagagctcccaatcgtcttacgggcagcagtcctcctaccctggctatggccagcagccagctcccagcagcacctcgggaagttacggtagcagttctcagagcagcagctatgggcagccccagagtgggagctacagccagcagcctagctatggtggacagcagcaaagctatggacagcagcaaagctataatccccctcagggctatggacagcagaaccagtacaacagcagcagtggtggtggaggtggaggtggaggtggaggtaactatggccaagatcaatcctccatgagtagtggtggtggcagtggtggcggttatggcaatcaagaccagagtggtggaggtggcagcggtggctatggacagcaggaccgtggaggccgcggcaggggtggcagtggtggcggcggcggcggcggcggtggtggttacaaccgcagcagtggtggctatgaacccagaggtcgtggaggtggccgtggaggcagaggtggcatgggcggaagtgaccgtggtggcttcaataaatttggtggccctcgggaccaaggatcacgtcatgactccgaacaggataattcagacaacaacaccatctttgtgcaaggcctgggtgagaatgttacaattgagtctgtggctgattacttcaagcagattggtattattaagacaaacaagaaaacgggacagcccatgattaatttgtacacagacagggaaactggcaagctgaagggagaggcaacggtctcttttgatgacccaccttcagctaaagcagctattgactggtttgatggtaaagaattctccggaaatcctatcaaggtctcatttgctactcgccgggcagactttaatcggggtggtggcaatggtcgtggaggccgagggcgaggaggacccatgggccgtggaggctatggaggtggtggcagtggtggtggtggccgaggaggatttcccagtggaggtggtggcggtggaggacagcagcgagctggtgactggaagtgtcctaatcccacctgtgagaatatgaacttctcttggaggaatgaatgcaaccagtgtaaggcccctaaaccagatggcccaggagggggaccaggtggctctcacatggggggtaactacggggatgatcgtcgtggtggcagaggaggcgcgatcgcaaatctggtggcccagctggaaaacgaggtggccagcctggaaaacgagaacgaaaccctgaagaaaaagaacctgcacaagaaggacctgatcgcctacctggaaaaggaaatcgccaacctgagaaagaagatcgaggaagcatcgatatatccctatgatgtgccggattatgctggagcaccaggaagtgctggttctgctgctggtagtggagcttctaactttactcagttcgttctcgtcgacaatggcggaactggcgacgtgactgtcgccccaagcaacttcgctaacgggatcgctgaatggatcagctctaactcgcgttcacaggcttacaaagtaacctgtagcgttcgtcagagctctgcgcagaatcgcaaatacaccatcaaagtcgaggtgcctaaaggcgcctggcgttcgtacttaaatatggaactaaccattccaattttcgccacgaattccgactgcgagcttattgttaaggcaatgcaaggtctcctaaaagatggaaacccgattccctcagcaatcgcagcaaactccggcatctacgggctaagcggtgctccggggtcagccggaagtgcagcaggatcaggtaatctggtggcccagctggaaaacgaggtggccagcctggaaaacgagaacgaaaccctgaagaaaaagaacctgcacaagaaggacctgatcgcctacctggaaaaggaaatcgccaacctgagaaagaagatcgaggaaggcaagcctattcccaaccccctgctgggcctggatagcaccggagcaccaggaagtgctggttctgctgctggtagtggagcgtgcccggtgccgctgcagctgccgccgctggaacgcctgaccctggatgacaaaaaaccgctgaataccctgatctctgctactggtctgtggatgagtcgtaccggaaccattcataaaatcaaacaccacgaggttagccgttcgaaaatctatattgagatggcgtgtggcgatcatctggttgtgaacaatagccgctcttctcgtacagcacgtgcactgcgtcaccacaaatatcgtaaaacctgtaaacgttgccgtgtgtccgatgaggatctgaacaaattcctgacaaaagccaatgaggaccaaacaagcgtgaaagtgaaagtcgttagcgctcctacccgtactaaaaaagcaatgccgaaatccgttgctcgtgcccctaaaccactggaaaacactgaagcagcacaggcacagccgtctggaagcaaattctctccggccattcctgtttctacccaggagtccgtttctgttccagcaagtgtgagcaccagcattagcagtattagcaccggtgccaccgctagcgccctggttaaaggcaataccaatccgattacaagcatgtctgccccggttcaagcatcagctccagcactgacaaaatcccaaaccgatcgtctggaggttctgctgaatccgaaagacgaaatcagcctgaattccggcaaaccgtttcgtgaactggagagcgaactgctgtcacgtcgtaaaaaagacctgcaacaaatctatgccgaagaacgtgagaactatctggggaaactggaacgtgaaatcacccgctttttcgtggatcgtggctttctggagatcaaatccccgattctgattcctctggagtatatcgagcgtatgggcatcgacaatgataccgaactgagcaaacaaattttccgtgtggataaaaacttctgtctgcgccctatgctagcaccaaatctggctaactatctgcgcaaactggaccgtgccctgcctgatcctatcaaaatcttcgagatcggcccgtgttatcgtaaagagtccgacggtaaagaacatctggaggagtttaccatgctgaacttttgccaaatgggttcaggttgtactcgtgagaacctggaaagcatcatcaccgattttctgaaccacctgggcattgacttcaaaattgtgggcgacagctgtatggtgtttggcgacaccctggatgtcatgcacggcgacctggaactgtctagtgccgttgtgggcccaatcccgctggatcgtgagtggggtatcgacaaaccttggatcggtgcgggttttggtctggagcgtctgctgaaagtaaaacacgacttcaagaacatcaaacgtgctgcacgttccgagtcctattacaatggtatttctactaacctgtaa

SEQ ID NO: 628 - protein, 1299 aa, Artificial Sequence
  Description of Artificial Sequence: Synthetic polypeptide
  TOM20::FUS::SYNZIP1::MCP::SYNZIP1::PylRS(AF)
MVGRNSAIAAGVCGALFIGYCIYFDRKRRSDPNFKNRLRERRKKQKLAKERAGLSKLPDLKDAEAVQKFFMASNDYTQQATQSYGAYPTQPGQGYSQQSSQPYGQQSYSGYSQSTDTSGYGQSSYSSYGQSQNTGYGTQSTPQGYGSTGGYGSSQSSQSSYGQQSSYPGYGQQPAPSSTSGSYGSSSQSSSYGQPQSGSYSQQPSYGGQQQSYGQQQSYNPPQGYGQQNQYNSSSGGGGGGGGGGNYGQDQSSMSSGGGSGGGYGNQDQSGGGGSGGYGQQDRGGRGRGGSGGGGGGGGGGYNRSSGGYEPRGRGGGRGGRGGMGGSDRGGFNKFGGPRDQGSRHDSEQDNSDNNTIFVQGLGENVTIESVADYFKQIGIIKTNKKTGQPMINLYTDRETGKLKGEATVSFDDPPSAKAAIDWFDGKEFSGNPIKVSFATRRADFNRGGGNGRGGRGRGGPMGRGGYGGGGSGGGGRGGFPSGGGGGGGQQRAGDWKCPNPTCENMNFSWRNECNQCKAPKPDGPGGGPGGSHMGGNYGDDRRGGRGGAIANLVAQLENEVASLENENETLKKKNLHKKDLIAYLEKEIANLRKKIEEASIYPYDVPDYAGAPGSAGSAAGSGASNFTQFVLVDNGGTGDVTVAPSNFANGIAEWISSNSRSQAYKVTCSVRQSSAQNRKYTIKVEVPKGAWRSYLNMELTIPIFATNSDCELIVKAMQGLLKDGNPIPSAIAANSGIYGLSGAPGSAGSAAGSGNLVAQLENEVASLENENETLKKKNLHKKDLIAYLEKEIANLRKKIEEGKPIPNPLLGLDSTGAPGSAGSAAGSGACPVPLQLPPLERLTLDDKKPLNTLISATGLWMSRTGTIHKIKHHEVSRSKIYIEMACGDHLVVNNSRSSRTARALRHHKYRKTCKRCRVSDEDLNKFLTKANEDQTSVKVKVVSAPTRTKKAMPKSVARAPKPLENTEAAQAQPSGSKFSPAIPVSTQESVSVPASVSTSISSISTGATASALVKGNTNPITSMSAPVQASAPALTKSQTDRLEVLLNPKDEISLNSGKPFRELESELLSRRKKDLQQIYAEERENYLGKLEREITRFFVDRGFLEIKSPILIPLEYIERMGIDNDTELSKQIFRVDKNFCLRPMLAPNLANYLRKLDRALPDPIKIFEIGPCYRKESDGKEHLEEFTMLNFCQMGSGCTRENLESIITDFLNHLGIDFKIVGDSCMVFGDTLDVMHGDLELSSAVVGPIPLDREWGIDKPWIGAGFGLERLLKVKHDFKNIKRAARSESYYNGISTNL

SEQ ID NO: 629 - DNA, 4530 bp, Artificial Sequence
  Description of Artificial Sequence: Synthetic polynucleotide
  TOM20::EWSR1::SYNZIP4::4xlambdaN22::SYNZIP4::PylRS(AA)
atggtgggtcggaacagcgccatcgccgccggtgtatgcggggcccttttcattgggtactgcatctacttcgaccgcaaaagacgaagtgaccccaacttcaagaacaggcttcgagaacgaagaaagaaacagaagcttgccaaggagagagctgggctttccaagttacctgaccttaaagatgctgaagctgttcagaagttcttcatggcgtccacggattacagtacctatagccaagctgcagcgcagcagggctacagtgcttacaccgcccagcccactcaaggatatgcacagaccacccaggcatatgggcaacaaagctatggaacctatggacagcccactgatgtcagctatacccaggctcagaccactgcaacctatgggcagaccgcctatgcaacttcttatggacagcctcccactggttatactactccaactgccccccaggcatacagccagcctgtccaggggtatggcactggtgcttatgataccaccactgctacagtcaccaccacccaggcctcctatgcagctcagtctgcatatggcactcagcctgcttatccagcctatgggcagcagccagcagccactgcacctacaagaccgcaggatggaaacaagcccactgagactagtcaacctcaatctagcacagggggttacaaccagcccagcctaggatatggacagagtaactacagttatccccaggtacctgggagctaccccatgcagccagtcactgcacctccatcctaccctcctaccagctattcctctacacagccgactagttatgatcagagcagttactctcagcagaacacctatgggcaaccgagcagctatggacagcagagtagctatggtcaacaaagcagctatgggcagcagcctcccactagttacccaccccaaactggatcctacagccaagctccaagtcaatatagccaacagagcagcagctacgggcagcagagttcattccgacaggaccaccccagtagcatgggtgtttatgggcaggagtctggaggattttccggaccaggagagaaccggagcatgagtggccctgataaccggggcaggggaagagggggatttgatcgtggaggcatgagcagaggtgggcggggaggaggacgcggtggaatgggcagcgctggagagcgaggtggcttcaataagcctggtggacccatggatgaaggaccagatcttgatctaggcccacctgtagatccagatgaagactctgacaacagtgcaatttatgtacaaggattaaatgacagtgtgactctagatgatctggcagacttctttaagcagtgtggggttgttaagatgaacaagagaactgggcaacccatgatccacatctacctggacaaggaaacaggaaagcccaaaggcgatgccacagtgtcctatgaagacccacctactgccaaggctgccgtggaatggtttgatgggaaagattttcaagggagcaaacttaaagtctcccttgctcggaagaagcctccaatgaacagtatgcggggtggtctgccaccccgtgagggcagaggcatgccaccaccactccgtggaggtccaggaggcccaggaggtcctgggggacccatgggtcgcatgggaggccgtggaggagatagaggaggcttccctccaagaggaccccggggttcccgagggaacccctctggaggaggaaacgtccagcaccgagctggagactggcagtgtcccaatccgggttgtggaaaccagaacttcgcctggagaacagagtgcaaccagtgtaaggccccaaagcctgaaggcttcctcccgccaccctttccgcccccgggtggtgatcgtggcagaggtggccctggtggcatgcggggaggaagaggtggcctcatggatcgtggtggtcccggtggaatgttcagaggtggccgtggtggagacagaggtggcttccgtggtggccggggcatggaccgaggtggctttggtggaggaagacgaggtggccctggggggccccctggacctttgatggaacaggcgatcgcacaaaaggtggctgaactgaaaaatagagtggccgtgaagctgaaccggaacgagcagctgaagaacaaggtggaagagctgaagaacagaaacgcctacctgaagaatgagctggccaccctggaaaacgaggtggccagactggaaaacgacgtggccgagggagcaccaggaagtgctggttctgctgctggtagtggagagcagaagctgatctcagaggaggacctgctagccaccatggacgcacaaacacgacgacgtgagcgtcgcgctgagaaacaagctcaatggaaagctgcaaacccaccgctcgacggagccggagctggcgctggagctggagccggagctggcggtctagccaccatggacgcacaaacacgacgacgtgagcgtcgcgctgagaaacaagctcaatggaaagctgcaaacccaccgctcgacggagccggagctggcgctggagctggagccggagctggcggtctagccaccatggacgcacaaacacgacgacgtgagcgtcgcgctgagaaacaagctcaatggaaagctgcaaacccaccgctcgacggagccggagctggcgctggagctggagccggagctggcggtctagccaccatggacgcacaaacacgacgacgtgagcgtcgcgctgagaaacaagctcaatggaaagctgcaaacccaccgctcgagtctagagggcccgtttctgggctaagcggtgctccggggtcagccggaagtgcagcaggatcaggtcaaaaggtggctgaactgaaaaatagagtggccgtgaagctgaaccggaacgagcagctgaagaacaaggtggaagagctgaagaacagaaacgcctacctgaagaatgagctggccaccctggaaaacgaggtggccagactggaaaacgacgtggccgagggcaagcctattcccaaccccctgctgggcctggatagcaccggagcaccaggaagtgctggttctgctgctggtagtggagcgtgcccggtgccgctgcagctgccgccgctggaacgcctgaccctggatgacaaaaaaccgctgaataccctgatctctgctactggtctgtggatgagtcgtaccggaaccattcataaaatcaaacaccacgaggttagccgttcgaaaatctatattgagatggcgtgtggcgatcatctggttgtgaacaatagccgctcttctcgtacagcacgtgcactgcgtcaccacaaatatcgtaaaacctgtaaacgttgccgtgtgtccgatgaggatctgaacaaattcctgacaaaagccaatgaggaccaaacaagcgtgaaagtgaaagtcgttagcgctcctacccgtactaaaaaagcaatgccgaaatccgttgctcgtgcccctaaaccactggaaaacactgaagcagcacaggcacagccgtctggaagcaaattctctccggccattcctgtttctacccaggagtccgtttctgttccagcaagtgtgagcaccagcattagcagtattagcaccggtgccaccgctagcgccctggttaaaggcaataccaatccgattacaagcatgtctgccccggttcaagcatcagctccagcactgacaaaatcccaaaccgatcgtctggaggttctgctgaatccgaaagacgaaatcagcctgaattccggcaaaccgtttcgtgaactggagagcgaactgctgtcacgtcgtaaaaaagacctgcaacaaatctatgccgaagaacgtgagaactatctggggaaactggaacgtgaaatcacccgctttttcgtggatcgtggctttctggagatcaaatccccgattctgattcctctggagtatatcgagcgtatgggcatcgacaatgataccgaactgagcaaacaaattttccgtgtggataaaaacttctgtctgcgccctatgctggcaccaaatctgtataactatctgcgcaaactggaccgtgccctgcctgatcctatcaaaatcttcgagatcggcccgtgttatcgtaaagagtccgacggtaaagaacatctggaggagtttaccatgctggcctttgcccaaatgggttcaggttgtactcgtgagaacctggaaagcatcatcaccgattttctgaaccacctgggcattgacttcaaaattgtgggcgacagctgtatggtgtatggcgacaccctggatgtcatgcacggcgacctggaactgtctagtgccgttgttggaccaattccgctggaccgtgagtggggtatcgacaaaccgtggatcggagcaggattcggtctggaacgcctgctgaaagtgaaacacgacttcaaaaacatcaaacgtgccgcccgttctgaatcgtattataacgggatctctacgaacctgtaa

SEQ ID NO: 630 - protein, 1509 aa, Artificial Sequence
  Description of Artificial Sequence: Synthetic polypeptide
  TOM20::EWSR1::SYNZIP4::4xlambdaN22::SYNZIP4::PylRS(AA)
MVGRNSAIAAGVCGALFIGYCIYFDRKRRSDPNFKNRLRERRKKQKLAKERAGLSKLPDLKDAEAVQKFFMASTDYSTYSQAAAQQGYSAYTAQPTQGYAQTTQAYGQQSYGTYGQPTDVSYTQAQTTATYGQTAYATSYGQPPTGYTTPTAPQAYSQPVQGYGTGAYDTTTATVTTTQASYAAQSAYGTQPAYPAYGQQPAATAPTRPQDGNKPTETSQPQSSTGGYNQPSLGYGQSNYSYPQVPGSYPMQPVTAPPSYPPTSYSSTQPTSYDQSSYSQQNTYGQPSSYGQQSSYGQQSSYGQQPPTSYPPQTGSYSQAPSQYSQQSSSYGQQSSFRQDHPSSMGVYGQESGGFSGPGENRSMSGPDNRGRGRGGFDRGGMSRGGRGGGRGGMGSAGERGGFNKPGGPMDEGPDLDLGPPVDPDEDSDNSAIYVQGLNDSVTLDDLADFFKQCGVVKMNKRTGQPMIHIYLDKETGKPKGDATVSYEDPPTAKAAVEWFDGKDFQGSKLKVSLARKKPPMNSMRGGLPPREGRGMPPPLRGGPGGPGGPGGPMGRMGGRGGDRGGFPPRGPRGSRGNPSGGGNVQHRAGDWQCPNPGCGNQNFAWRTECNQCKAPKPEGFLPPPFPPPGGDRGRGGPGGMRGGRGGLMDRGGPGGMFRGGRGGDRGGFRGGRGMDRGGFGGGRRGGPGGPPGPLMEQAIAQKVAELKNRVAVKLNRNEQLKNKVEELKNRNAYLKNELATLENEVARLENDVAEGAPGSAGSAAGSGEQKLISEEDLLATMDAQTRRRERRAEKQAQWKAANPPLDGAGAGAGAGAGAGGLATMDAQTRRRERRAEKQAQWKAANPPLDGAGAGAGAGAGAGGLATMDAQTRRRERRAEKQAQWKAANPPLDGAGAGAGAGAGAGGLATMDAQTRRRERRAEKQAQWKAANPPLESRGPVSGLSGAPGSAGSAAGSGQKVAELKNRVAVKLNRNEQLKNKVEELKNRNAYLKNELATLENEVARLENDVAEGKPIPNPLLGLDSTGAPGSAGSAAGSGACPVPLQLPPLERLTLDDKKPLNTLISATGLWMSRTGTIHKIKHHEVSRSKIYIEMACGDHLVVNNSRSSRTARALRHHKYRKTCKRCRVSDEDLNKFLTKANEDQTSVKVKVVSAPTRTKKAMPKSVARAPKPLENTEAAQAQPSGSKFSPAIPVSTQESVSVPASVSTSISSISTGATASALVKGNTNPITSMSAPVQASAPALTKSQTDRLEVLLNPKDEISLNSGKPFRELESELLSRRKKDLQQIYAEERENYLGKLEREITRFFVDRGFLEIKSPILIPLEYIERMGIDNDTELSKQIFRVDKNFCLRPMLAPNLYNYLRKLDRALPDPIKIFEIGPCYRKESDGKEHLEEFTMLAFAQMGSGCTRENLESIITDFLNHLGIDFKIVGDSCMVYGDTLDVMHGDLELSSAVVGPIPLDREWGIDKPWIGAGFGLERLLKVKHDFKNIKRAARSESYYNGISTNL

SEQ ID NO: 631 - DNA, 4005 bp, Artificial Sequence
  Description of Artificial Sequence: Synthetic polynucleotide
  TOM20::FUS::SYNZIP3::4xlambdaN22::SYNZIP3::PylRS(AA)
atggtgggtcggaacagcgccatcgccgccggtgtatgcggggcccttttcattgggtactgcatctacttcgaccgcaaaagacgaagtgaccccaacttcaagaacaggcttcgagaacgaagaaagaaacagaagcttgccaaggagagagctgggctttccaagttacctgaccttaaagatgctgaagctgttcagaaattcttcatggcctcaaacgattatacccaacaagcaacccaaagctatggggcctaccccacccagcccgggcagggctattcccagcagagcagtcagccctacggacagcagagttacagtggttatagccagtccacggacacttcaggatatggccagagcagctattcttcttatggccagagccagaacacaggctatggaactcagtcaactccccagggatatggctcgactggcggctatggcagtagccagagctcccaatcgtcttacgggcagcagtcctcctaccctggctatggccagcagccagctcccagcagcacctcgggaagttacggtagcagttctcagagcagcagctatgggcagccccagagtgggagctacagccagcagcctagctatggtggacagcagcaaagctatggacagcagcaaagctataatccccctcagggctatggacagcagaaccagtacaacagcagcagtggtggtggaggtggaggtggaggtggaggtaactatggccaagatcaatcctccatgagtagtggtggtggcagtggtggcggttatggcaatcaagaccagagtggtggaggtggcagcggtggctatggacagcaggaccgtggaggccgcggcaggggtggcagtggtggcggcggcggcggcggcggtggtggttacaaccgcagcagtggtggctatgaacccagaggtcgtggaggtggccgtggaggcagaggtggcatgggcggaagtgaccgtggtggcttcaataaatttggtggccctcgggaccaaggatcacgtcatgactccgaacaggataattcagacaacaacaccatctttgtgcaaggcctgggtgagaatgttacaattgagtctgtggctgattacttcaagcagattggtattattaagacaaacaagaaaacgggacagcccatgattaatttgtacacagacagggaaactggcaagctgaagggagaggcaacggtctcttttgatgacccaccttcagctaaagcagctattgactggtttgatggtaaagaattctccggaaatcctatcaaggtctcatttgctactcgccgggcagactttaatcggggtggtggcaatggtcgtggaggccgagggcgaggaggacccatgggccgtggaggctatggaggtggtggcagtggtggtggtggccgaggaggatttcccagtggaggtggtggcggtggaggacagcagcgagctggtgactggaagtgtcctaatcccacctgtgagaatatgaacttctcttggaggaatgaatgcaaccagtgtaaggcccctaaaccagatggcccaggagggggaccaggtggctctcacatggggggtaactacggggatgatcgtcgtggtggcagaggaggcgcgatcgcaaatgaggtgaccaccctggaaaacgacgccgccttcatcgagaacgagaacgcctacctggaaaaagagatcgccagactgagaaaggaaaaggccgctctgcggaacagactggcccacaagaagggagcaccaggaagtgctggttctgctgctggtagtggagcatcgatagagcagaagctgatctcagaggaggacctgctagccaccatggacgcacaaacacgacgacgtgagcgtcgcgctgagaaacaagctcaatggaaagctgcaaacccaccgctcgacggagccggagctggcgctggagctggagccggagctggcggtctagccaccatggacgcacaaacacgacgacgtgagcgtcgcgctgagaaacaagctcaatggaaagctgcaaacccaccgctcgacggagccggagctggcgctggagctggagccggagctggcggtctagccaccatggacgcacaaacacgacgacgtgagcgtcgcgctgagaaacaagctcaatggaaagctgcaaacccaccgctcgacggagccggagctggcgctggagctggagccggagctggcggtctagccaccatggacgcacaaacacgacgacgtgagcgtcgcgctgagaaacaagctcaatggaaagctgcaaacccaccgctcgagtctagagggctaagcggtgctccggggtcagccggaagtgcagcaggatcaggtaatgaggtgaccaccctggaaaacgacgccgccttcatcgagaacgagaacgcctacctggaaaaagagatcgccagactgagaaaggaaaaggccgctctgcggaacagactggcccacaagaagggcaagcctattcccaaccccctgctgggcctggatagcaccggagcaccaggaagtgctggttctgctgctggtagtggagcgtgcccggtgccgctgcagctgccgccgctggaacgcctgaccctggatgacaaaaaaccgctgaataccctgatctctgctactggtctgtggatgagtcgtaccggaaccattcataaaatcaaacaccacgaggttagccgttcgaaaatctatattgagatggcgtgtggcgatcatctggttgtgaacaatagccgctcttctcgtacagcacgtgcactgcgtcaccacaaatatcgtaaaacctgtaaacgttgccgtgtgtccgatgaggatctgaacaaattcctgacaaaagccaatgaggaccaaacaagcgtgaaagtgaaagtcgttagcgctcctacccgtactaaaaaagcaatgccgaaatccgttgctcgtgcccctaaaccactggaaaacactgaagcagcacaggcacagccgtctggaagcaaattctctccggccattcctgtttctacccaggagtccgtttctgttccagcaagtgtgagcaccagcattagcagtattagcaccggtgccaccgctagcgccctggttaaaggcaataccaatccgattacaagcatgtctgccccggttcaagcatcagctccagcactgacaaaatcccaaaccgatcgtctggaggttctgctgaatccgaaagacgaaatcagcctgaattccggcaaaccgtttcgtgaactggagagcgaactgctgtcacgtcgtaaaaaagacctgcaacaaatctatgccgaagaacgtgagaactatctggggaaactggaacgtgaaatcacccgctttttcgtggatcgtggctttctggagatcaaatccccgattctgattcctctggagtatatcgagcgtatgggcatcgacaatgataccgaactgagcaaacaaattttccgtgtggataaaaacttctgtctgcgccctatgctggcaccaaatctgtataactatctgcgcaaactggaccgtgccctgcctgatcctatcaaaatcttcgagatcggcccgtgttatcgtaaagagtccgacggtaaagaacatctggaggagtttaccatgctggcctttgcccaaatgggttcaggttgtactcgtgagaacctggaaagcatcatcaccgattttctgaaccacctgggcattgacttcaaaattgtgggcgacagctgtatggtgtatggcgacaccctggatgtcatgcacggcgacctggaactgtctagtgccgttgttggaccaattccgctggaccgtgagtggggtatcgacaaaccgtggatcggagcaggattcggtctggaacgcctgctgaaagtgaaacacgacttcaaaaacatcaaacgtgccgcccgttctgaatcgtattataacgggatctctacgaacctgtaa

SEQ ID NO: 632 - protein, 1334 aa, Artificial Sequence
  Description of Artificial Sequence: Synthetic polypeptide
  TOM20::FUS::SYNZIP3::4xlambdaN22::SYNZIP3::PylRS(AA)
MVGRNSAIAAGVCGALFIGYCIYFDRKRRSDPNFKNRLRERRKKQKLAKERAGLSKLPDLKDAEAVQKFFMASNDYTQQATQSYGAYPTQPGQGYSQQSSQPYGQQSYSGYSQSTDTSGYGQSSYSSYGQSQNTGYGTQSTPQGYGSTGGYGSSQSSQSSYGQQSSYPGYGQQPAPSSTSGSYGSSSQSSSYGQPQSGSYSQQPSYGGQQQSYGQQQSYNPPQGYGQQNQYNSSSGGGGGGGGGGNYGQDQSSMSSGGGSGGGYGNQDQSGGGGSGGYGQQDRGGRGRGGSGGGGGGGGGGYNRSSGGYEPRGRGGGRGGRGGMGGSDRGGFNKFGGPRDQGSRHDSEQDNSDNNTIFVQGLGENVTIESVADYFKQIGIIKTNKKTGQPMINLYTDRETGKLKGEATVSFDDPPSAKAAIDWFDGKEFSGNPIKVSFATRRADFNRGGGNGRGGRGRGGPMGRGGYGGGGSGGGGRGGFPSGGGGGGGQQRAGDWKCPNPTCENMNFSWRNECNQCKAPKPDGPGGGPGGSHMGGNYGDDRRGGRGGAIANEVTTLENDAAFIENENAYLEKEIARLRKEKAALRNRLAHKKGAPGSAGSAAGSGASIEQKLISEEDLLATMDAQTRRRERRAEKQAQWKAANPPLDGAGAGAGAGAGAGGLATMDAQTRRRERRAEKQAQWKAANPPLDGAGAGAGAGAGAGGLATMDAQTRRRERRAEKQAQWKAANPPLDGAGAGAGAGAGAGGLATMDAQTRRRERRAEKQAQWKAANPPLESRGLSGAPGSAGSAAGSGNEVTTLENDAAFIENENAYLEKEIARLRKEKAALRNRLAHKKGKPIPNPLLGLDSTGAPGSAGSAAGSGACPVPLQLPPLERLTLDDKKPLNTLISATGLWMSRTGTIHKIKHHEVSRSKIYIEMACGDHLVVNNSRSSRTARALRHHKYRKTCKRCRVSDEDLNKFLTKANEDQTSVKVKVVSAPTRTKKAMPKSVARAPKPLENTEAAQAQPSGSKFSPAIPVSTQESVSVPASVSTSISSISTGATASALVKGNTNPITSMSAPVQASAPALTKSQTDRLEVLLNPKDEISLNSGKPFRELESELLSRRKKDLQQIYAEERENYLGKLEREITRFFVDRGFLEIKSPILIPLEYIERMGIDNDTELSKQIFRVDKNFCLRPMLAPNLYNYLRKLDRALPDPIKIFEIGPCYRKESDGKEHLEEFTMLAFAQMGSGCTRENLESIITDFLNHLGIDFKIVGDSCMVYGDTLDVMHGDLELSSAVVGPIPLDREWGIDKPWIGAGFGLERLLKVKHDFKNIKRAARSESYYNGISTNL

SEQ ID NO: 633 - DNA, 4362 bp, Artificial Sequence
  Description of Artificial Sequence: Synthetic polynucleotide
  LCK::EWSR1::SYNZIP4::4xlambdaN22::SYNZIP4::PylRS(AF)
atgggctgcgtgtgcagcagcaaccccgagggtaccgagctcatggcgtccacggattacagtacctatagccaagctgcagcgcagcagggctacagtgcttacaccgcccagcccactcaaggatatgcacagaccacccaggcatatgggcaacaaagctatggaacctatggacagcccactgatgtcagctatacccaggctcagaccactgcaacctatgggcagaccgcctatgcaacttcttatggacagcctcccactggttatactactccaactgccccccaggcatacagccagcctgtccaggggtatggcactggtgcttatgataccaccactgctacagtcaccaccacccaggcctcctatgcagctcagtctgcatatggcactcagcctgcttatccagcctatgggcagcagccagcagccactgcacctacaagaccgcaggatggaaacaagcccactgagactagtcaacctcaatctagcacagggggttacaaccagcccagcctaggatatggacagagtaactacagttatccccaggtacctgggagctaccccatgcagccagtcactgcacctccatcctaccctcctaccagctattcctctacacagccgactagttatgatcagagcagttactctcagcagaacacctatgggcaaccgagcagctatggacagcagagtagctatggtcaacaaagcagctatgggcagcagcctcccactagttacccaccccaaactggatcctacagccaagctccaagtcaatatagccaacagagcagcagctacgggcagcagagttcattccgacaggaccaccccagtagcatgggtgtttatgggcaggagtctggaggattttccggaccaggagagaaccggagcatgagtggccctgataaccggggcaggggaagagggggatttgatcgtggaggcatgagcagaggtgggcggggaggaggacgcggtggaatgggcagcgctggagagcgaggtggcttcaataagcctggtggacccatggatgaaggaccagatcttgatctaggcccacctgtagatccagatgaagactctgacaacagtgcaatttatgtacaaggattaaatgacagtgtgactctagatgatctggcagacttctttaagcagtgtggggttgttaagatgaacaagagaactgggcaacccatgatccacatctacctggacaaggaaacaggaaagcccaaaggcgatgccacagtgtcctatgaagacccacctactgccaaggctgccgtggaatggtttgatgggaaagattttcaagggagcaaacttaaagtctcccttgctcggaagaagcctccaatgaacagtatgcggggtggtctgccaccccgtgagggcagaggcatgccaccaccactccgtggaggtccaggaggcccaggaggtcctgggggacccatgggtcgcatgggaggccgtggaggagatagaggaggcttccctccaagaggaccccggggttcccgagggaacccctctggaggaggaaacgtccagcaccgagctggagactggcagtgtcccaatccgggttgtggaaaccagaacttcgcctggagaacagagtgcaaccagtgtaaggccccaaagcctgaaggcttcctcccgccaccctttccgcccccgggtggtgatcgtggcagaggtggccctggtggcatgcggggaggaagaggtggcctcatggatcgtggtggtcccggtggaatgttcagaggtggccgtggtggagacagaggtggcttccgtggtggccggggcatggaccgaggtggctttggtggaggaagacgaggtggccctggggggccccctggacctttgatggaacaggcgatcgcacaaaaggtggctgaactgaaaaatagagtggccgtgaagctgaaccggaacgagcagctgaagaacaaggtggaagagctgaagaacagaaacgcctacctgaagaatgagctggccaccctggaaaacgaggtggccagactggaaaacgacgtggccgagggagcaccaggaagtgctggttctgctgctggtagtggagagcagaagctgatctcagaggaggacctgctagccaccatggacgcacaaacacgacgacgtgagcgtcgcgctgagaaacaagctcaatggaaagctgcaaacccaccgctcgacggagccggagctggcgctggagctggagccggagctggcggtctagccaccatggacgcacaaacacgacgacgtgagcgtcgcgctgagaaacaagctcaatggaaagctgcaaacccaccgctcgacggagccggagctggcgctggagctggagccggagctggcggtctagccaccatggacgcacaaacacgacgacgtgagcgtcgcgctgagaaacaagctcaatggaaagctgcaaacccaccgctcgacggagccggagctggcgctggagctggagccggagctggcggtctagccaccatggacgcacaaacacgacgacgtgagcgtcgcgctgagaaacaagctcaatggaaagctgcaaacccaccgctcgagtctagagggcccgtttctgggctaagcggtgctccggggtcagccggaagtgcagcaggatcaggtcaaaaggtggctgaactgaaaaatagagtggccgtgaagctgaaccggaacgagcagctgaagaacaaggtggaagagctgaagaacagaaacgcctacctgaagaatgagctggccaccctggaaaacgaggtggccagactggaaaacgacgtggccgagggcaagcctattcccaaccccctgctgggcctggatagcaccggagcaccaggaagtgctggttctgctgctggtagtggagcgtgcccggtgccgctgcagctgccgccgctggaacgcctgaccctggatgacaaaaaaccgctgaataccctgatctctgctactggtctgtggatgagtcgtaccggaaccattcataaaatcaaacaccacgaggttagccgttcgaaaatctatattgagatggcgtgtggcgatcatctggttgtgaacaatagccgctcttctcgtacagcacgtgcactgcgtcaccacaaatatcgtaaaacctgtaaacgttgccgtgtgtccgatgaggatctgaacaaattcctgacaaaagccaatgaggaccaaacaagcgtgaaagtgaaagtcgttagcgctcctacccgtactaaaaaagcaatgccgaaatccgttgctcgtgcccctaaaccactggaaaacactgaagcagcacaggcacagccgtctggaagcaaattctctccggccattcctgtttctacccaggagtccgtttctgttccagcaagtgtgagcaccagcattagcagtattagcaccggtgccaccgctagcgccctggttaaaggcaataccaatccgattacaagcatgtctgccccggttcaagcatcagctccagcactgacaaaatcccaaaccgatcgtctggaggttctgctgaatccgaaagacgaaatcagcctgaattccggcaaaccgtttcgtgaactggagagcgaactgctgtcacgtcgtaaaaaagacctgcaacaaatctatgccgaagaacgtgagaactatctggggaaactggaacgtgaaatcacccgctttttcgtggatcgtggctttctggagatcaaatccccgattctgattcctctggagtatatcgagcgtatgggcatcgacaatgataccgaactgagcaaacaaattttccgtgtggataaaaacttctgtctgcgccctatgctagcaccaaatctggctaactatctgcgcaaactggaccgtgccctgcctgatcctatcaaaatcttcgagatcggcccgtgttatcgtaaagagtccgacggtaaagaacatctggaggagtttaccatgctgaacttttgccaaatgggttcaggttgtactcgtgagaacctggaaagcatcatcaccgattttctgaaccacctgggcattgacttcaaaattgtgggcgacagctgtatggtgtttggcgacaccctggatgtcatgcacggcgacctggaactgtctagtgccgttgtgggcccaatcccgctggatcgtgagtggggtatcgacaaaccttggatcggtgcgggttttggtctggagcgtctgctgaaagtaaaacacgacttcaagaacatcaaacgtgctgcacgttccgagtcctattacaatggtatttctactaacctgtaa

SEQ ID NO: 634 - protein, 1453 aa, Artificial Sequence
  Description of Artificial Sequence: Synthetic polypeptide
  LCK::EWSR1::SYNZIP4::4xlambdaN22::SYNZIP4::PylRS(AF)
MGCVCSSNPEGTELMASTDYSTYSQAAAQQGYSAYTAQPTQGYAQTTQAYGQQSYGTYGQPTDVSYTQAQTTATYGQTAYATSYGQPPTGYTTPTAPQAYSQPVQGYGTGAYDTTTATVTTTQASYAAQSAYGTQPAYPAYGQQPAATAPTRPQDGNKPTETSQPQSSTGGYNQPSLGYGQSNYSYPQVPGSYPMQPVTAPPSYPPTSYSSTQPTSYDQSSYSQQNTYGQPSSYGQQSSYGQQSSYGQQPPTSYPPQTGSYSQAPSQYSQQSSSYGQQSSFRQDHPSSMGVYGQESGGFSGPGENRSMSGPDNRGRGRGGFDRGGMSRGGRGGGRGGMGSAGERGGFNKPGGPMDEGPDLDLGPPVDPDEDSDNSAIYVQGLNDSVTLDDLADFFKQCGVVKMNKRTGQPMIHIYLDKETGKPKGDATVSYEDPPTAKAAVEWFDGKDFQGSKLKVSLARKKPPMNSMRGGLPPREGRGMPPPLRGGPGGPGGPGGPMGRMGGRGGDRGGFPPRGPRGSRGNPSGGGNVQHRAGDWQCPNPGCGNQNFAWRTECNQCKAPKPEGFLPPPFPPPGGDRGRGGPGGMRGGRGGLMDRGGPGGMFRGGRGGDRGGFRGGRGMDRGGFGGGRRGGPGGPPGPLMEQAIAQKVAELKNRVAVKLNRNEQLKNKVEELKNRNAYLKNELATLENEVARLENDVAEGAPGSAGSAAGSGEQKLISEEDLLATMDAQTRRRERRAEKQAQWKAANPPLDGAGAGAGAGAGAGGLATMDAQTRRRERRAEKQAQWKAANPPLDGAGAGAGAGAGAGGLATMDAQTRRRERRAEKQAQWKAANPPLDGAGAGAGAGAGAGGLATMDAQTRRRERRAEKQAQWKAANPPLESRGPVSGLSGAPGSAGSAAGSGQKVAELKNRVAVKLNRNEQLKNKVEELKNRNAYLKNELATLENEVARLENDVAEGKPIPNPLLGLDSTGAPGSAGSAAGSGACPVPLQLPPLERLTLDDKKPLNTLISATGLWMSRTGTIHKIKHHEVSRSKIYIEMACGDHLVVNNSRSSRTARALRHHKYRKTCKRCRVSDEDLNKFLTKANEDQTSVKVKVVSAPTRTKKAMPKSVARAPKPLENTEAAQAQPSGSKFSPAIPVSTQESVSVPASVSTSISSISTGATASALVKGNTNPITSMSAPVQASAPALTKSQTDRLEVLLNPKDEISLNSGKPFRELESELLSRRKKDLQQIYAEERENYLGKLEREITRFFVDRGFLEIKSPILIPLEYIERMGIDNDTELSKQIFRVDKNFCLRPMLAPNLANYLRKLDRALPDPIKIFEIGPCYRKESDGKEHLEEFTMLNFCQMGSGCTRENLESIITDFLNHLGIDFKIVGDSCMVFGDTLDVMHGDLELSSAVVGPIPLDREWGIDKPWIGAGFGLERLLKVKHDFKNIKRAARSESYYNGISTNL

SEQ ID NO: 635 - DNA, 3834 bp, Artificial Sequence
  Description of Artificial Sequence: Synthetic polynucleotide
  LCK::FUS::SYNZIP3::4xlambdaN22::SYNZIP3::PylRS(AF)
atgggctgcgtgtgcagcagcaaccccgagggtaccgagctcgcctcaaacgattatacccaacaagcaacccaaagctatggggcctaccccacccagcccgggcagggctattcccagcagagcagtcagccctacggacagcagagttacagtggttatagccagtccacggacacttcaggatatggccagagcagctattcttcttatggccagagccagaacacaggctatggaactcagtcaactccccagggatatggctcgactggcggctatggcagtagccagagctcccaatcgtcttacgggcagcagtcctcctaccctggctatggccagcagccagctcccagcagcacctcgggaagttacggtagcagttctcagagcagcagctatgggcagccccagagtgggagctacagccagcagcctagctatggtggacagcagcaaagctatggacagcagcaaagctataatccccctcagggctatggacagcagaaccagtacaacagcagcagtggtggtggaggtggaggtggaggtggaggtaactatggccaagatcaatcctccatgagtagtggtggtggcagtggtggcggttatggcaatcaagaccagagtggtggaggtggcagcggtggctatggacagcaggaccgtggaggccgcggcaggggtggcagtggtggcggcggcggcggcggcggtggtggttacaaccgcagcagtggtggctatgaacccagaggtcgtggaggtggccgtggaggcagaggtggcatgggcggaagtgaccgtggtggcttcaataaatttggtggccctcgggaccaaggatcacgtcatgactccgaacaggataattcagacaacaacaccatctttgtgcaaggcctgggtgagaatgttacaattgagtctgtggctgattacttcaagcagattggtattattaagacaaacaagaaaacgggacagcccatgattaatttgtacacagacagggaaactggcaagctgaagggagaggcaacggtctcttttgatgacccaccttcagctaaagcagctattgactggtttgatggtaaagaattctccggaaatcctatcaaggtctcatttgctactcgccgggcagactttaatcggggtggtggcaatggtcgtggaggccgagggcgaggaggacccatgggccgtggaggctatggaggtggtggcagtggtggtggtggccgaggaggatttcccagtggaggtggtggcggtggaggacagcagcgagctggtgactggaagtgtcctaatcccacctgtgagaatatgaacttctcttggaggaatgaatgcaaccagtgtaaggcccctaaaccagatggcccaggagggggaccaggtggctctcacatggggggtaactacggggatgatcgtcgtggtggcagaggaggcgcgatcgcaaatgaggtgaccaccctggaaaacgacgccgccttcatcgagaacgagaacgcctacctggaaaaagagatcgccagactgagaaaggaaaaggccgctctgcggaacagactggcccacaagaagggagcaccaggaagtgctggttctgctgctggtagtggagcatcgatagagcagaagctgatctcagaggaggacctgctagccaccatggacgcacaaacacgacgacgtgagcgtcgcgctgagaaacaagctcaatggaaagctgcaaacccaccgctcgacggagccggagctggcgctggagctggagccggagctggcggtctagccaccatggacgcacaaacacgacgacgtgagcgtcgcgctgagaaacaagctcaatggaaagctgcaaacccaccgctcgacggagccggagctggcgctggagctggagccggagctggcggtctagccaccatggacgcacaaacacgacgacgtgagcgtcgcgctgagaaacaagctcaatggaaagctgcaaacccaccgctcgacggagccggagctggcgctggagctggagccggagctggcggtctagccaccatggacgcacaaacacgacgacgtgagcgtcgcgctgagaaacaagctcaatggaaagctgcaaacccaccgctcgagtctagagggctaagcggtgctccggggtcagccggaagtgcagcaggatcaggtaatgaggtgaccaccctggaaaacgacgccgccttcatcgagaacgagaacgcctacctggaaaaagagatcgccagactgagaaaggaaaaggccgctctgcggaacagactggcccacaagaagggcaagcctattcccaaccccctgctgggcctggatagcaccggagcaccaggaagtgctggttctgctgctggtagtggagcgtgcccggtgccgctgcagctgccgccgctggaacgcctgaccctggatgacaaaaaaccgctgaataccctgatctctgctactggtctgtggatgagtcgtaccggaaccattcataaaatcaaacaccacgaggttagccgttcgaaaatctatattgagatggcgtgtggcgatcatctggttgtgaacaatagccgctcttctcgtacagcacgtgcactgcgtcaccacaaatatcgtaaaacctgtaaacgttgccgtgtgtccgatgaggatctgaacaaattcctgacaaaagccaatgaggaccaaacaagcgtgaaagtgaaagtcgttagcgctcctacccgtactaaaaaagcaatgccgaaatccgttgctcgtgcccctaaaccactggaaaacactgaagcagcacaggcacagccgtctggaagcaaattctctccggccattcctgtttctacccaggagtccgtttctgttccagcaagtgtgagcaccagcattagcagtattagcaccggtgccaccgctagcgccctggttaaaggcaataccaatccgattacaagcatgtctgccccggttcaagcatcagctccagcactgacaaaatcccaaaccgatcgtctggaggttctgctgaatccgaaagacgaaatcagcctgaattccggcaaaccgtttcgtgaactggagagcgaactgctgtcacgtcgtaaaaaagacctgcaacaaatctatgccgaagaacgtgagaactatctggggaaactggaacgtgaaatcacccgctttttcgtggatcgtggctttctggagatcaaatccccgattctgattcctctggagtatatcgagcgtatgggcatcgacaatgataccgaactgagcaaacaaattttccgtgtggataaaaacttctgtctgcgccctatgctagcaccaaatctggctaactatctgcgcaaactggaccgtgccctgcctgatcctatcaaaatcttcgagatcggcccgtgttatcgtaaagagtccgacggtaaagaacatctggaggagtttaccatgctgaacttttgccaaatgggttcaggttgtactcgtgagaacctggaaagcatcatcaccgattttctgaaccacctgggcattgacttcaaaattgtgggcgacagctgtatggtgtttggcgacaccctggatgtcatgcacggcgacctggaactgtctagtgccgttgtgggcccaatcccgctggatcgtgagtggggtatcgacaaaccttggatcggtgcgggttttggtctggagcgtctgctgaaagtaaaacacgacttcaagaacatcaaacgtgctgcacgttccgagtcctattacaatggtatttctactaacctgtaa

SEQ ID NO: 636 - protein, 1277 aa, Artificial Sequence
  Description of Artificial Sequence: Synthetic polypeptide
  LCK::FUS::SYNZIP3::4xlambdaN22::SYNZIP3::PylRS(AF)
MGCVCSSNPEGTELASNDYTQQATQSYGAYPTQPGQGYSQQSSQPYGQQSYSGYSQSTDTSGYGQSSYSSYGQSQNTGYGTQSTPQGYGSTGGYGSSQSSQSSYGQQSSYPGYGQQPAPSSTSGSYGSSSQSSSYGQPQSGSYSQQPSYGGQQQSYGQQQSYNPPQGYGQQNQYNSSSGGGGGGGGGGNYGQDQSSMSSGGGSGGGYGNQDQSGGGGSGGYGQQDRGGRGRGGSGGGGGGGGGGYNRSSGGYEPRGRGGGRGGRGGMGGSDRGGFNKFGGPRDQGSRHDSEQDNSDNNTIFVQGLGENVTIESVADYFKQIGIIKTNKKTGQPMINLYTDRETGKLKGEATVSFDDPPSAKAAIDWFDGKEFSGNPIKVSFATRRADFNRGGGNGRGGRGRGGPMGRGGYGGGGSGGGGRGGFPSGGGGGGGQQRAGDWKCPNPTCENMNFSWRNECNQCKAPKPDGPGGGPGGSHMGGNYGDDRRGGRGGAIANEVTTLENDAAFIENENAYLEKEIARLRKEKAALRNRLAHKKGAPGSAGSAAGSGASIEQKLISEEDLLATMDAQTRRRERRAEKQAQWKAANPPLDGAGAGAGAGAGAGGLATMDAQTRRRERRAEKQAQWKAANPPLDGAGAGAGAGAGAGGLATMDAQTRRRERRAEKQAQWKAANPPLDGAGAGAGAGAGAGGLATMDAQTRRRERRAEKQAQWKAANPPLESRGLSGAPGSAGSAAGSGNEVTTLENDAAFIENENAYLEKEIARLRKEKAALRNRLAHKKGKPIPNPLLGLDSTGAPGSAGSAAGSGACPVPLQLPPLERLTLDDKKPLNTLISATGLWMSRTGTIHKIKHHEVSRSKIYIEMACGDHLVVNNSRSSRTARALRHHKYRKTCKRCRVSDEDLNKFLTKANEDQTSVKVKVVSAPTRTKKAMPKSVARAPKPLENTEAAQAQPSGSKFSPAIPVSTQESVSVPASVSTSISSISTGATASALVKGNTNPITSMSAPVQASAPALTKSQTDRLEVLLNPKDEISLNSGKPFRELESELLSRRKKDLQQIYAEERENYLGKLEREITRFFVDRGFLEIKSPILIPLEYIERMGIDNDTELSKQIFRVDKNFCLRPMLAPNLANYLRKLDRALPDPIKIFEIGPCYRKESDGKEHLEEFTMLNFCQMGSGCTRENLESIITDFLNHLGIDFKIVGDSCMVFGDTLDVMHGDLELSSAVVGPIPLDREWGIDKPWIGAGFGLERLLKVKHDFKNIKRAARSESYYNGISTNL

SEQ ID NO: 637 - DNA, 4005 bp, Artificial Sequence
  Description of Artificial Sequence: Synthetic polynucleotide
  TOM20::FUS::SYNZIP3::4xlambdaN22::SYNZIP3::PylRS(AF)
atggtgggtcggaacagcgccatcgccgccggtgtatgcggggcccttttcattgggtactgcatctacttcgaccgcaaaagacgaagtgaccccaacttcaagaacaggcttcgagaacgaagaaagaaacagaagcttgccaaggagagagctgggctttccaagttacctgaccttaaagatgctgaagctgttcagaaattcttcatggcctcaaacgattatacccaacaagcaacccaaagctatggggcctaccccacccagcccgggcagggctattcccagcagagcagtcagccctacggacagcagagttacagtggttatagccagtccacggacacttcaggatatggccagagcagctattcttcttatggccagagccagaacacaggctatggaactcagtcaactccccagggatatggctcgactggcggctatggcagtagccagagctcccaatcgtcttacgggcagcagtcctcctaccctggctatggccagcagccagctcccagcagcacctcgggaagttacggtagcagttctcagagcagcagctatgggcagccccagagtgggagctacagccagcagcctagctatggtggacagcagcaaagctatggacagcagcaaagctataatccccctcagggctatggacagcagaaccagtacaacagcagcagtggtggtggaggtggaggtggaggtggaggtaactatggccaagatcaatcctccatgagtagtggtggtggcagtggtggcggttatggcaatcaagaccagagtggtggaggtggcagcggtggctatggacagcaggaccgtggaggccgcggcaggggtggcagtggtggcggcggcggcggcggcggtggtggttacaaccgcagcagtggtggctatgaacccagaggtcgtggaggtggccgtggaggcagaggtggcatgggcggaagtgaccgtggtggcttcaataaatttggtggccctcgggaccaaggatcacgtcatgactccgaacaggataattcagacaacaacaccatctttgtgcaaggcctgggtgagaatgttacaattgagtctgtggctgattacttcaagcagattggtattattaagacaaacaagaaaacgggacagcccatgattaatttgtacacagacagggaaactggcaagctgaagggagaggcaacggtctcttttgatgacccaccttcagctaaagcagctattgactggtttgatggtaaagaattctccggaaatcctatcaaggtctcatttgctactcgccgggcagactttaatcggggtggtggcaatggtcgtggaggccgagggcgaggaggacccatgggccgtggaggctatggaggtggtggcagtggtggtggtggccgaggaggatttcccagtggaggtggtggcggtggaggacagcagcgagctggtgactggaagtgtcctaatcccacctgtgagaatatgaacttctcttggaggaatgaatgcaaccagtgtaaggcccctaaaccagatggcccaggagggggaccaggtggctctcacatggggggtaactacggggatgatcgtcgtggtggcagaggaggcgcgatcgcaaatgaggtgaccaccctggaaaacgacgccgccttcatcgagaacgagaacgcctacctggaaaaagagatcgccagactgagaaaggaaaaggccgctctgcggaacagactggcccacaagaagggagcaccaggaagtgctggttctgctgctggtagtggagcatcgatagagcagaagctgatctcagaggaggacctgctagccaccatggacgcacaaacacgacgacgtgagcgtcgcgctgagaaacaagctcaatggaaagctgcaaacccaccgctcgacggagccggagctggcgctggagctggagccggagctggcggtctagccaccatggacgcacaaacacgacgacgtgagcgtcgcgctgagaaacaagctcaatggaaagctgcaaacccaccgctcgacggagccggagctggcgctggagctggagccggagctggcggtctagccaccatggacgcacaaacacgacgacgtgagcgtcgcgctgagaaacaagctcaatggaaagctgcaaacccaccgctcgacggagccggagctggcgctggagctggagccggagctggcggtctagccaccatggacgcacaaacacgacgacgtgagcgtcgcgctgagaaacaagctcaatggaaagctgcaaacccaccgctcgagtctagagggctaagcggtgctccggggtcagccggaagtgcagcaggatcaggtaatgaggtgaccaccctggaaaacgacgccgccttcatcgagaacgagaacgcctacctggaaaaagagatcgccagactgagaaaggaaaaggccgctctgcggaacagactggcccacaagaagggcaagcctattcccaaccccctgctgggcctggatagcaccggagcaccaggaagtgctggttctgctgctggtagtggagcgtgcccggtgccgctgcagctgccgccgctggaacgcctgaccctggatgacaaaaaaccgctgaataccctgatctctgctactggtctgtggatgagtcgtaccggaaccattcataaaatcaaacaccacgaggttagccgttcgaaaatctatattgagatggcgtgtggcgatcatctggttgtgaacaatagccgctcttctcgtacagcacgtgcactgcgtcaccacaaatatcgtaaaacctgtaaacgttgccgtgtgtccgatgaggatctgaacaaattcctgacaaaagccaatgaggaccaaacaagcgtgaaagtgaaagtcgttagcgctcctacccgtactaaaaaagcaatgccgaaatccgttgctcgtgcccctaaaccactggaaaacactgaagcagcacaggcacagccgtctggaagcaaattctctccggccattcctgtttctacccaggagtccgtttctgttccagcaagtgtgagcaccagcattagcagtattagcaccggtgccaccgctagcgccctggttaaaggcaataccaatccgattacaagcatgtctgccccggttcaagcatcagctccagcactgacaaaatcccaaaccgatcgtctggaggttctgctgaatccgaaagacgaaatcagcctgaattccggcaaaccgtttcgtgaactggagagcgaactgctgtcacgtcgtaaaaaagacctgcaacaaatctatgccgaagaacgtgagaactatctggggaaactggaacgtgaaatcacccgctttttcgtggatcgtggctttctggagatcaaatccccgattctgattcctctggagtatatcgagcgtatgggcatcgacaatgataccgaactgagcaaacaaattttccgtgtggataaaaacttctgtctgcgccctatgctagcaccaaatctggctaactatctgcgcaaactggaccgtgccctgcctgatcctatcaaaatcttcgagatcggcccgtgttatcgtaaagagtccgacggtaaagaacatctggaggagtttaccatgctgaacttttgccaaatgggttcaggttgtactcgtgagaacctggaaagcatcatcaccgattttctgaaccacctgggcattgacttcaaaattgtgggcgacagctgtatggtgtttggcgacaccctggatgtcatgcacggcgacctggaactgtctagtgccgttgtgggcccaatcccgctggatcgtgagtggggtatcgacaaaccttggatcggtgcgggttttggtctggagcgtctgctgaaagtaaaacacgacttcaagaacatcaaacgtgctgcacgttccgagtcctattacaatggtatttctactaacctgtaa

SEQ ID NO: 638 - protein, 1334 aa, Artificial Sequence
  Description of Artificial Sequence: Synthetic polypeptide
  TOM20::FUS::SYNZIP3::4xlambdaN22::SYNZIP3::PylRS(AF)
MVGRNSAIAAGVCGALFIGYCIYFDRKRRSDPNFKNRLRERRKKQKLAKERAGLSKLPDLKDAEAVQKFFMASNDYTQQATQSYGAYPTQPGQGYSQQSSQPYGQQSYSGYSQSTDTSGYGQSSYSSYGQSQNTGYGTQSTPQGYGSTGGYGSSQSSQSSYGQQSSYPGYGQQPAPSSTSGSYGSSSQSSSYGQPQSGSYSQQPSYGGQQQSYGQQQSYNPPQGYGQQNQYNSSSGGGGGGGGGGNYGQDQSSMSSGGGSGGGYGNQDQSGGGGSGGYGQQDRGGRGRGGSGGGGGGGGGGYNRSSGGYEPRGRGGGRGGRGGMGGSDRGGFNKFGGPRDQGSRHDSEQDNSDNNTIFVQGLGENVTIESVADYFKQIGIIKTNKKTGQPMINLYTDRETGKLKGEATVSFDDPPSAKAAIDWFDGKEFSGNPIKVSFATRRADFNRGGGNGRGGRGRGGPMGRGGYGGGGSGGGGRGGFPSGGGGGGGQQRAGDWKCPNPTCENMNFSWRNECNQCKAPKPDGPGGGPGGSHMGGNYGDDRRGGRGGAIANEVTTLENDAAFIENENAYLEKEIARLRKEKAALRNRLAHKKGAPGSAGSAAGSGASIEQKLISEEDLLATMDAQTRRRERRAEKQAQWKAANPPLDGAGAGAGAGAGAGGLATMDAQTRRRERRAEKQAQWKAANPPLDGAGAGAGAGAGAGGLATMDAQTRRRERRAEKQAQWKAANPPLDGAGAGAGAGAGAGGLATMDAQTRRRERRAEKQAQWKAANPPLESRGLSGAPGSAGSAAGSGNEVTTLENDAAFIENENAYLEKEIARLRKEKAALRNRLAHKKGKPIPNPLLGLDSTGAPGSAGSAAGSGACPVPLQLPPLERLTLDDKKPLNTLISATGLWMSRTGTIHKIKHHEVSRSKIYIEMACGDHLVVNNSRSSRTARALRHHKYRKTCKRCRVSDEDLNKFLTKANEDQTSVKVKVVSAPTRTKKAMPKSVARAPKPLENTEAAQAQPSGSKFSPAIPVSTQESVSVPASVSTSISSISTGATASALVKGNTNPITSMSAPVQASAPALTKSQTDRLEVLLNPKDEISLNSGKPFRELESELLSRRKKDLQQIYAEERENYLGKLEREITRFFVDRGFLEIKSPILIPLEYIERMGIDNDTELSKQIFRVDKNFCLRPMLAPNLANYLRKLDRALPDPIKIFEIGPCYRKESDGKEHLEEFTMLNFCQMGSGCTRENLESIITDFLNHLGIDFKIVGDSCMVFGDTLDVMHGDLELSSAVVGPIPLDREWGIDKPWIGAGFGLERLLKVKHDFKNIKRAARSESYYNGISTNL

SEQ ID NO: 639 - DNA, 4359 bp, Artificial Sequence
  Description of Artificial Sequence: Synthetic polynucleotide
  TOM20::EWSR1::SYNZIP2::MCP::SYNZIP2::PylRS(AF)
atggtgggtcggaacagcgccatcgccgccggtgtatgcggggcccttttcattgggtactgcatctacttcgaccgcaaaagacgaagtgaccccaacttcaagaacaggcttcgagaacgaagaaagaaacagaagcttgccaaggagagagctgggctttccaagttacctgaccttaaagatgctgaagctgttcagaagttcttcatggcgtccacggattacagtacctatagccaagctgcagcgcagcagggctacagtgcttacaccgcccagcccactcaaggatatgcacagaccacccaggcatatgggcaacaaagctatggaacctatggacagcccactgatgtcagctatacccaggctcagaccactgcaacctatgggcagaccgcctatgcaacttcttatggacagcctcccactggttatactactccaactgccccccaggcatacagccagcctgtccaggggtatggcactggtgcttatgataccaccactgctacagtcaccaccacccaggcctcctatgcagctcagtctgcatatggcactcagcctgcttatccagcctatgggcagcagccagcagccactgcacctacaagaccgcaggatggaaacaagcccactgagactagtcaacctcaatctagcacagggggttacaaccagcccagcctaggatatggacagagtaactacagttatccccaggtacctgggagctaccccatgcagccagtcactgcacctccatcctaccctcctaccagctattcctctacacagccgactagttatgatcagagcagttactctcagcagaacacctatgggcaaccgagcagctatggacagcagagtagctatggtcaacaaagcagctatgggcagcagcctcccactagttacccaccccaaactggatcctacagccaagctccaagtcaatatagccaacagagcagcagctacgggcagcagagttcattccgacaggaccaccccagtagcatgggtgtttatgggcaggagtctggaggattttccggaccaggagagaaccggagcatgagtggccctgataaccggggcaggggaagagggggatttgatcgtggaggcatgagcagaggtgggcggggaggaggacgcggtggaatgggcagcgctggagagcgaggtggcttcaataagcctggtggacccatggatgaaggaccagatcttgatctaggcccacctgtagatccagatgaagactctgacaacagtgcaatttatgtacaaggattaaatgacagtgtgactctagatgatctggcagacttctttaagcagtgtggggttgttaagatgaacaagagaactgggcaacccatgatccacatctacctggacaaggaaacaggaaagcccaaaggcgatgccacagtgtcctatgaagacccacctactgccaaggctgccgtggaatggtttgatgggaaagattttcaagggagcaaacttaaagtctcccttgctcggaagaagcctccaatgaacagtatgcggggtggtctgccaccccgtgagggcagaggcatgccaccaccactccgtggaggtccaggaggcccaggaggtcctgggggacccatgggtcgcatgggaggccgtggaggagatagaggaggcttccctccaagaggaccccggggttcccgagggaacccctctggaggaggaaacgtccagcaccgagctggagactggcagtgtcccaatccgggttgtggaaaccagaacttcgcctggagaacagagtgcaaccagtgtaaggccccaaagcctgaaggcttcctcccgccaccctttccgcccccgggtggtgatcgtggcagaggtggccctggtggcatgcggggaggaagaggtggcctcatggatcgtggtggtcccggtggaatgttcagaggtggccgtggtggagacagaggtggcttccgtggtggccggggcatggaccgaggtggctttggtggaggaagacgaggtggccctggggggccccctggacctttgatggaacaggcgatcgcagctagaaacgcctacctgagaaagaaaatcgccagactgaagaaggacaacctgcagctggaaagagacgagcagaacctggaaaagatcatcgccaacctcagagatgagatcgccagactggaaaacgaggtggccagccacgagcagtatccctatgatgtgccggattatgctggagcaccaggaagtgctggttctgctgctggtagtggagcttctaactttactcagttcgttctcgtcgacaatggcggaactggcgacgtgactgtcgccccaagcaacttcgctaacgggatcgctgaatggatcagctctaactcgcgttcacaggcttacaaagtaacctgtagcgttcgtcagagctctgcgcagaatcgcaaatacaccatcaaagtcgaggtgcctaaaggcgcctggcgttcgtacttaaatatggaactaaccattccaattttcgccacgaattccgactgcgagcttattgttaaggcaatgcaaggtctcctaaaagatggaaacccgattccctcagcaatcgcagcaaactccggcatctacgggctaagcggtgctccggggtcagccggaagtgcagcaggatcaggtgctagaaacgcctacctgagaaagaaaatcgccagactgaagaaggacaacctgcagctggaaagagacgagcagaacctggaaaagatcatcgccaacctcagagatgagatcgccagactggaaaacgaggtggccagccacgagcagggcaagcctattcccaaccccctgctgggcctggatagcaccggagcaccaggaagtgctggttctgctgctggtagtggagcgtgcccggtgccgctgcagctgccgccgctggaacgcctgaccctggatgacaaaaaaccgctgaataccctgatctctgctactggtctgtggatgagtcgtaccggaaccattcataaaatcaaacaccacgaggttagccgttcgaaaatctatattgagatggcgtgtggcgatcatctggttgtgaacaatagccgctcttctcgtacagcacgtgcactgcgtcaccacaaatatcgtaaaacctgtaaacgttgccgtgtgtccgatgaggatctgaacaaattcctgacaaaagccaatgaggaccaaacaagcgtgaaagtgaaagtcgttagcgctcctacccgtactaaaaaagcaatgccgaaatccgttgctcgtgcccctaaaccactggaaaacactgaagcagcacaggcacagccgtctggaagcaaattctctccggccattcctgtttctacccaggagtccgtttctgttccagcaagtgtgagcaccagcattagcagtattagcaccggtgccaccgctagcgccctggttaaaggcaataccaatccgattacaagcatgtctgccccggttcaagcatcagctccagcactgacaaaatcccaaaccgatcgtctggaggttctgctgaatccgaaagacgaaatcagcctgaattccggcaaaccgtttcgtgaactggagagcgaactgctgtcacgtcgtaaaaaagacctgcaacaaatctatgccgaagaacgtgagaactatctggggaaactggaacgtgaaatcacccgctttttcgtggatcgtggctttctggagatcaaatccccgattctgattcctctggagtatatcgagcgtatgggcatcgacaatgataccgaactgagcaaacaaattttccgtgtggataaaaacttctgtctgcgccctatgctagcaccaaatctggctaactatctgcgcaaactggaccgtgccctgcctgatcctatcaaaatcttcgagatcggcccgtgttatcgtaaagagtccgacggtaaagaacatctggaggagtttaccatgctgaacttttgccaaatgggttcaggttgtactcgtgagaacctggaaagcatcatcaccgattttctgaaccacctgggcattgacttcaaaattgtgggcgacagctgtatggtgtttggcgacaccctggatgtcatgcacggcgacctggaactgtctagtgccgttgtgggcccaatcccgctggatcgtgagtggggtatcgacaaaccttggatcggtgcgggttttggtctggagcgtctgctgaaagtaaaacacgacttcaagaacatcaaacgtgctgcacgttccgagtcctattacaatggtatttctactaacctgtaa

SEQ ID NO: 640 - protein, 1452 aa, Artificial Sequence
  Description of Artificial Sequence: Synthetic polypeptide
  TOM20::EWSR1::SYNZIP2::MCP::SYNZIP2::PylRS(AF)
MVGRNSAIAAGVCGALFIGYCIYFDRKRRSDPNFKNRLRERRKKQKLAKERAGLSKLPDLKDAEAVQKFFMASTDYSTYSQAAAQQGYSAYTAQPTQGYAQTTQAYGQQSYGTYGQPTDVSYTQAQTTATYGQTAYATSYGQPPTGYTTPTAPQAYSQPVQGYGTGAYDTTTATVTTTQASYAAQSAYGTQPAYPAYGQQPAATAPTRPQDGNKPTETSQPQSSTGGYNQPSLGYGQSNYSYPQVPGSYPMQPVTAPPSYPPTSYSSTQPTSYDQSSYSQQNTYGQPSSYGQQSSYGQQSSYGQQPPTSYPPQTGSYSQAPSQYSQQSSSYGQQSSFRQDHPSSMGVYGQESGGFSGPGENRSMSGPDNRGRGRGGFDRGGMSRGGRGGGRGGMGSAGERGGFNKPGGPMDEGPDLDLGPPVDPDEDSDNSAIYVQGLNDSVTLDDLADFFKQCGVVKMNKRTGQPMIHIYLDKETGKPKGDATVSYEDPPTAKAAVEWFDGKDFQGSKLKVSLARKKPPMNSMRGGLPPREGRGMPPPLRGGPGGPGGPGGPMGRMGGRGGDRGGFPPRGPRGSRGNPSGGGNVQHRAGDWQCPNPGCGNQNFAWRTECNQCKAPKPEGFLPPPFPPPGGDRGRGGPGGMRGGRGGLMDRGGPGGMFRGGRGGDRGGFRGGRGMDRGGFGGGRRGGPGGPPGPLMEQAIAARNAYLRKKIARLKKDNLQLERDEQNLEKIIANLRDEIARLENEVASHEQYPYDVPDYAGAPGSAGSAAGSGASNFTQFVLVDNGGTGDVTVAPSNFANGIAEWISSNSRSQAYKVTCSVRQSSAQNRKYTIKVEVPKGAWRSYLNMELTIPIFATNSDCELIVKAMQGLLKDGNPIPSAIAANSGIYGLSGAPGSAGSAAGSGARNAYLRKKIARLKKDNLQLERDEQNLEKIIANLRDEIARLENEVASHEQGKPIPNPLLGLDSTGAPGSAGSAAGSGACPVPLQLPPLERLTLDDKKPLNTLISATGLWMSRTGTIHKIKHHEVSRSKIYIEMACGDHLVVNNSRSSRTARALRHHKYRKTCKRCRVSDEDLNKFLTKANEDQTSVKVKVVSAPTRTKKAMPKSVARAPKPLENTEAAQAQPSGSKFSPAIPVSTQESVSVPASVSTSISSISTGATASALVKGNTNPITSMSAPVQASAPALTKSQTDRLEVLLNPKDEISLNSGKPFRELESELLSRRKKDLQQIYAEERENYLGKLEREITRFFVDRGFLEIKSPILIPLEYIERMGIDNDTELSKQIFRVDKNFCLRPMLAPNLANYLRKLDRALPDPIKIFEIGPCYRKESDGKEHLEEFTMLNFCQMGSGCTRENLESIITDFLNHLGIDFKIVGDSCMVFGDTLDVMHGDLELSSAVVGPIPLDREWGIDKPWIGAGFGLERLLKVKHDFKNIKRAARSESYYNGISTNL

SEQ ID NO: 641 - DNA, 1455 bp, Artificial Sequence
  Description of Artificial Sequence: Synthetic polynucleotide
  LCK::OMeRS
atgggctgcgtgtgcagcagcaaccccgagggtaccgagctcgcgtgcccggtgccgctgcagctgccgccgctggaacgcctgaccctggatgataaaaaaccgctgaataccctgatctctgctactggtctgtggatgagtcgtaccggaaccattcataaaatcaaacaccacgaggttagccgttcgaaaatctatattgagatggcgtgtggcgatcatctggttgtgaacaatagccgctcttctcgtacagcacgtgcactgcgtcaccacaaatatcgtaaaacctgtaaacgttgccgtgtgtccgatgaggatctgaacaaattcctgacaaaagccaatgaggaccaaacaagcgtgaaagtgaaagtcgttagcgctcctacccgtactaaaaaagcaatgccgaaatccgttgctcgtgcccctaaaccactggaaaacactgaagcagcacaggcacagccgtctggaagcaaattctctccggccattcctgtttctacccaggagtccgtttctgttccagcaagtgtgagcaccagcattagcagtattagcaccggtgccaccgctagcgccctggttaaaggcaataccaatccgattacaagcatgtctgccccggttcaagcatcagctccagcactgacaaaatcccaaaccgatcgtctggaggttctgctgaatccgaaagacgaaatcagcctgaattccggcaaaccgtttcgtgaactggagagcgaactgctgtcacgtcgtaaaaaagacctgcaacaaatctatgccgaagaacgtgagaactatctggggaaactggaacgtgaaatcacccgctttttcgtggatcgtggctttctggagatcaaatccccgattctgattcctctggagtatatcgagcgtatgggcatcgacaatgataccgaactgagcaaacaaattttccgtgtggataaaaacttctgtctgcgccctatgctaacaccaaatctgtataactatctgcgcaaactggaccgtgccctgcctgatcctatcaaaatcttcgagatcggcccgtgttatcgtaaagagtccgacggtaaagaacatctggaggagtttaccatgctggtcttttggcaaatgggttcaggttgtactcgtgagaacctggaaagcatcatcaccgattttctgaaccacctgggcattgacttcaaaattgtgggcgacagctgtatggtgtttggcgacaccctggatgtcatgcacggcgacctggaactgtctagtgcccttgtgggcccaatcccgctggatcgtgagtggggtatcgacaaaccttggatcggtgcgggttttggtctggagcgtctgctgaaagtaaaacacgacttcaagaacatcaaacgtgctgcacgttccgagtcctattacaatggtatttctactaacctgtaa

SEQ ID NO: 642 - protein, 484 aa, Artificial Sequence
  Description of Artificial Sequence: Synthetic polypeptide
  LCK::OMeRS
MGCVCSSNPEGTELACPVPLQLPPLERLTLDDKKPLNTLISATGLWMSRTGTIHKIKHHEVSRSKIYIEMACGDHLVVNNSRSSRTARALRHHKYRKTCKRCRVSDEDLNKFLTKANEDQTSVKVKVVSAPTRTKKAMPKSVARAPKPLENTEAAQAQPSGSKFSPAIPVSTQESVSVPASVSTSISSISTGATASALVKGNTNPITSMSAPVQASAPALTKSQTDRLEVLLNPKDEISLNSGKPFRELESELLSRRKKDLQQIYAEERENYLGKLEREITRFFVDRGFLEIKSPILIPLEYIERMGIDNDTELSKQIFRVDKNFCLRPMLTPNLYNYLRKLDRALPDPIKIFEIGPCYRKESDGKEHLEEFTMLVFWQMGSGCTRENLESIITDFLNHLGIDFKIVGDSCMVFGDTLDVMHGDLELSSALVGPIPLDREWGIDKPWIGAGFGLERLLKVKHDFKNIKRAARSESYYNGISTNL

SEQ ID NO: 643 - DNA, 3147 bp, Artificial Sequence
  Description of Artificial Sequence: Synthetic polynucleotide
  TOM20::FUS::OMeRS
atggtgggtcggaacagcgccatcgccgccggtgtatgcggggcccttttcattgggtactgcatctacttcgaccgcaaaagacgaagtgaccccaacttcaagaacaggcttcgagaacgaagaaagaaacagaagcttgccaaggagagagctgggctttccaagttacctgaccttaaagatgctgaagctgttcagaaattcttcatggcctcaaacgattatacccaacaagcaacccaaagctatggggcctaccccacccagcccgggcagggctattcccagcagagcagtcagccctacggacagcagagttacagtggttatagccagtccacggacacttcaggatatggccagagcagctattcttcttatggccagagccagaacacaggctatggaactcagtcaactccccagggatatggctcgactggcggctatggcagtagccagagctcccaatcgtcttacgggcagcagtcctcctaccctggctatggccagcagccagctcccagcagcacctcgggaagttacggtagcagttctcagagcagcagctatgggcagccccagagtgggagctacagccagcagcctagctatggtggacagcagcaaagctatggacagcagcaaagctataatccccctcagggctatggacagcagaaccagtacaacagcagcagtggtggtggaggtggaggtggaggtggaggtaactatggccaagatcaatcctccatgagtagtggtggtggcagtggtggcggttatggcaatcaagaccagagtggtggaggtggcagcggtggctatggacagcaggaccgtggaggccgcggcaggggtggcagtggtggcggcggcggcggcggcggtggtggttacaaccgcagcagtggtggctatgaacccagaggtcgtggaggtggccgtggaggcagaggtggcatgggcggaagtgaccgtggtggcttcaataaatttggtggccctcgggaccaaggatcacgtcatgactccgaacaggataattcagacaacaacaccatctttgtgcaaggcctgggtgagaatgttacaattgagtctgtggctgattacttcaagcagattggtattattaagacaaacaagaaaacgggacagcccatgattaatttgtacacagacagggaaactggcaagctgaagggagaggcaacggtctcttttgatgacccaccttcagctaaagcagctattgactggtttgatggtaaagaattctccggaaatcctatcaaggtctcatttgctactcgccgggcagactttaatcggggtggtggcaatggtcgtggaggccgagggcgaggaggacccatgggccgtggaggctatggaggtggtggcagtggtggtggtggccgaggaggatttcccagtggaggtggtggcggtggaggacagcagcgagctggtgactggaagtgtcctaatcccacctgtgagaatatgaacttctcttggaggaatgaatgcaaccagtgtaaggcccctaaaccagatggcccaggagggggaccaggtggctctcacatggggggtaactacggggatgatcgtcgtggtggcagaggaggcgcgatcgcaggcaagcctattcccaaccccctgctgggcctggatagcaccggagcaccaggaagtgctggttctgctgctggtagtggagcgtgcccggtgccgctgcagctgccgccgctggaacgcctgaccctggatgataaaaaaccgctgaataccctgatctctgctactggtctgtggatgagtcgtaccggaaccattcataaaatcaaacaccacgaggttagccgttcgaaaatctatattgagatggcgtgtggcgatcatctggttgtgaacaatagccgctcttctcgtacagcacgtgcactgcgtcaccacaaatatcgtaaaacctgtaaacgttgccgtgtgtccgatgaggatctgaacaaattcctgacaaaagccaatgaggaccaaacaagcgtgaaagtgaaagtcgttagcgctcctacccgtactaaaaaagcaatgccgaaatccgttgctcgtgcccctaaaccactggaaaacactgaagcagcacaggcacagccgtctggaagcaaattctctccggccattcctgtttctacccaggagtccgtttctgttccagcaagtgtgagcaccagcattagcagtattagcaccggtgccaccgctagcgccctggttaaaggcaataccaatccgattacaagcatgtctgccccggttcaagcatcagctccagcactgacaaaatcccaaaccgatcgtctggaggttctgctgaatccgaaagacgaaatcagcctgaattccggcaaaccgtttcgtgaactggagagcgaactgctgtcacgtcgtaaaaaagacctgcaacaaatctatgccgaagaacgtgagaactatctggggaaactggaacgtgaaatcacccgctttttcgtggatcgtggctttctggagatcaaatccccgattctgattcctctggagtatatcgagcgtatgggcatcgacaatgataccgaactgagcaaacaaattttccgtgtggataaaaacttctgtctgcgccctatgctaacaccaaatctgtataactatctgcgcaaactggaccgtgccctgcctgatcctatcaaaatcttcgagatcggcccgtgttatcgtaaagagtccgacggtaaagaacatctggaggagtttaccatgctggtcttttggcaaatgggttcaggttgtactcgtgagaacctggaaagcatcatcaccgattttctgaaccacctgggcattgacttcaaaattgtgggcgacagctgtatggtgtttggcgacaccctggatgtcatgcacggcgacctggaactgtctagtgcccttgtgggcccaatcccgctggatcgtgagtggggtatcgacaaaccttggatcggtgcgggttttggtctggagcgtctgctgaaagtaaaacacgacttcaagaacatcaaacgtgctgcacgttccgagtcctattacaatggtatttctactaacctgtaa

SEQ ID NO: 644 - protein, 1048 aa, Artificial Sequence
  Description of Artificial Sequence: Synthetic polypeptide
  TOM20::FUS::OMeRS
MVGRNSAIAAGVCGALFIGYCIYFDRKRRSDPNFKNRLRERRKKQKLAKERAGLSKLPDLKDAEAVQKFFMASNDYTQQATQSYGAYPTQPGQGYSQQSSQPYGQQSYSGYSQSTDTSGYGQSSYSSYGQSQNTGYGTQSTPQGYGSTGGYGSSQSSQSSYGQQSSYPGYGQQPAPSSTSGSYGSSSQSSSYGQPQSGSYSQQPSYGGQQQSYGQQQSYNPPQGYGQQNQYNSSSGGGGGGGGGGNYGQDQSSMSSGGGSGGGYGNQDQSGGGGSGGYGQQDRGGRGRGGSGGGGGGGGGGYNRSSGGYEPRGRGGGRGGRGGMGGSDRGGFNKFGGPRDQGSRHDSEQDNSDNNTIFVQGLGENVTIESVADYFKQIGIIKTNKKTGQPMINLYTDRETGKLKGEATVSFDDPPSAKAAIDWFDGKEFSGNPIKVSFATRRADFNRGGGNGRGGRGRGGPMGRGGYGGGGSGGGGRGGFPSGGGGGGGQQRAGDWKCPNPTCENMNFSWRNECNQCKAPKPDGPGGGPGGSHMGGNYGDDRRGGRGGAIAGKPIPNPLLGLDSTGAPGSAGSAAGSGACPVPLQLPPLERLTLDDKKPLNTLISATGLWMSRTGTIHKIKHHEVSRSKIYIEMACGDHLVVNNSRSSRTARALRHHKYRKTCKRCRVSDEDLNKFLTKANEDQTSVKVKVVSAPTRTKKAMPKSVARAPKPLENTEAAQAQPSGSKFSPAIPVSTQESVSVPASVSTSISSISTGATASALVKGNTNPITSMSAPVQASAPALTKSQTDRLEVLLNPKDEISLNSGKPFRELESELLSRRKKDLQQIYAEERENYLGKLEREITRFFVDRGFLEIKSPILIPLEYIERMGIDNDTELSKQIFRVDKNFCLRPMLTPNLYNYLRKLDRALPDPIKIFEIGPCYRKESDGKEHLEEFTMLVFWQMGSGCTRENLESIITDFLNHLGIDFKIVGDSCMVFGDTLDVMHGDLELSSALVGPIPLDREWGIDKPWIGAGFGLERLLKVKHDFKNIKRAARSESYYNGISTNL

SEQ ID NO: 645 - DNA, 4188 bp, Artificial Sequence
  Description of Artificial Sequence: Synthetic polynucleotide
  KIF16B::FUS::OMeRS
atggcatcggtcaaggtggccgtgagggtccggcccatgaatcgcagggaaaaggacttggaggccaagttcattattcagatggagaaaagcaaaacgacaatcacaaacttaaagataccagaaggaggcactggggactcaggaagagaacggaccaagaccttcacctatgacttttctttttattctgctgatacaaaaagcccagattacgtttcacaagaaatggttttcaaaaccctcggcacagatgtcgtgaagtctgcatttgaaggttataatgcttgtgtctttgcatatgggcaaactggatctggaaagtcatacactatgatgggaaattctggagattctggcttaatacctcggatctgtgaaggactcttcagtcggataaatgaaaccaccagatgggatgaagcttcttttcgaactgaagtcagctacttagaaatttataacgaacgtgtgagagatctacttcggcggaagtcatctaaaaccttcaatttgagagtccgtgagcatcccaaagaaggcccttatgttgaggatttatccaaacatttagtacagaattatggtgacgtagaagaacttatggatgcgggcaatatcaaccggaccaccgcagcgactgggatgaacgacgtcagtagcaggtctcatgccatcttcaccatcaagttcactcaggctaaatttgattctgaaatgccatgtgaaaccgtcagtaagatccacttggttgatcttgccggaagtgagcgtgcagatgccaccggagccaccggggttaggctaaaggaagggggaaatattaacaagtccctcgtgactctggggaacgtcatttctgccttagctgatttatctcaggatgctgcaaatactcttgcaaagaagaagcaagttttcgtgccttacagggattctgtgttgacttggttgttaaaagatagccttggaggaaactctaaaactatcatgattgccaccatttcacctgctgatgtcaattatggagaaaccctaagtactcttcgctatgcaaatagagccaaaaacatcatcaacaagcctaccattaatgaggatgccaacgtcaaacttatccgtgagctgcgagctgaaatagccagactgaaaacgctgcttgctcaagggaatcagattgccctcttagactcccccacatatacagatattgaaatgaacagattgggaaagggcgcccccggctccgccggctccgccgccggctccggcatggcctcaaacgattatacccaacaagcaacccaaagctatggggcctaccccacccagcccgggcagggctattcccagcagagcagtcagccctacggacagcagagttacagtggttatagccagtccacggacacttcaggatatggccagagcagctattcttcttatggccagagccagaacacaggctatggaactcagtcaactccccagggatatggctcgactggcggctatggcagtagccagagctcccaatcgtcttacgggcagcagtcctcctaccctggctatggccagcagccagctcccagcagcacctcgggaagttacggtagcagttctcagagcagcagctatgggcagccccagagtgggagctacagccagcagcctagctatggtggacagcagcaaagctatggacagcagcaaagctataatccccctcagggctatggacagcagaaccagtacaacagcagcagtggtggtggaggtggaggtggaggtggaggtaactatggccaagatcaatcctccatgagtagtggtggtggcagtggtggcggttatggcaatcaagaccagagtggtggaggtggcagcggtggctatggacagcaggaccgtggaggccgcggcaggggtggcagtggtggcggcggcggcggcggcggtggtggttacaaccgcagcagtggtggctatgaacccagaggtcgtggaggtggccgtggaggcagaggtggcatgggcggaagtgaccgtggtggcttcaataaatttggtggccctcgggaccaaggatcacgtcatgactccgaacaggataattcagacaacaacaccatctttgtgcaaggcctgggtgagaatgttacaattgagtctgtggctgattacttcaagcagattggtattattaagacaaacaagaaaacgggacagcccatgattaatttgtacacagacagggaaactggcaagctgaagggagaggcaacggtctcttttgatgacccaccttcagctaaagcagctattgactggtttgatggtaaagaattctccggaaatcctatcaaggtctcatttgctactcgccgggcagactttaatcggggtggtggcaatggtcgtggaggccgagggcgaggaggacccatgggccgtggaggctatggaggtggtggcagtggtggtggtggccgaggaggatttcccagtggaggtggtggcggtggaggacagcagcgagctggtgactggaagtgtcctaatcccacctgtgagaatatgaacttctcttggaggaatgaatgcaaccagtgtaaggcccctaaaccagatggcccaggagggggaccaggtggctctcacatggggggtaactacggggatgatcgtcgtggtggcagaggaggcgattacaaggatgacgacgataagggtaccggcgcccccggctccgccggctccgccgccggctccggcgcgtgcccggtgccgctgcagctgccgccgctggaacgcctgaccctggatgataaaaaaccgctgaataccctgatctctgctactggtctgtggatgagtcgtaccggaaccattcataaaatcaaacaccacgaggttagccgttcgaaaatctatattgagatggcgtgtggcgatcatctggttgtgaacaatagccgctcttctcgtacagcacgtgcactgcgtcaccacaaatatcgtaaaacctgtaaacgttgccgtgtgtccgatgaggatctgaacaaattcctgacaaaagccaatgaggaccaaacaagcgtgaaagtgaaagtcgttagcgctcctacccgtactaaaaaagcaatgccgaaatccgttgctcgtgcccctaaaccactggaaaacactgaagcagcacaggcacagccgtctggaagcaaattctctccggccattcctgtttctacccaggagtccgtttctgttccagcaagtgtgagcaccagcattagcagtattagcaccggtgccaccgctagcgccctggttaaaggcaataccaatccgattacaagcatgtctgccccggttcaagcatcagctccagcactgacaaaatcccaaaccgatcgtctggaggttctgctgaatccgaaagacgaaatcagcctgaattccggcaaaccgtttcgtgaactggagagcgaactgctgtcacgtcgtaaaaaagacctgcaacaaatctatgccgaagaacgtgagaactatctggggaaactggaacgtgaaatcacccgctttttcgtggatcgtggctttctggagatcaaatccccgattctgattcctctggagtatatcgagcgtatgggcatcgacaatgataccgaactgagcaaacaaattttccgtgtggataaaaacttctgtctgcgccctatgctaacaccaaatctgtataactatctgcgcaaactggaccgtgccctgcctgatcctatcaaaatcttcgagatcggcccgtgttatcgtaaagagtccgacggtaaagaacatctggaggagtttaccatgctggtcttttggcaaatgggttcaggttgtactcgtgagaacctggaaagcatcatcaccgattttctgaaccacctgggcattgacttcaaaattgtgggcgacagctgtatggtgtttggcgacaccctggatgtcatgcacggcgacctggaactgtctagtgcccttgtgggcccaatcccgctggatcgtgagtggggtatcgacaaaccttggatcggtgcgggttttggtctggagcgtctgctgaaagtaaaacacgacttcaagaacatcaaacgtgctgcacgttccgagtcctattacaatggtatttctactaacctgtaa

SEQ ID NO: 646 - protein, 1395 aa, Artificial Sequence
  Description of Artificial Sequence: Synthetic polypeptide
  KIF16B::FUS::OMeRS
MASVKVAVRVRPMNRREKDLEAKFIIQMEKSKTTITNLKIPEGGTGDSGRERTKTFTYDFSFYSADTKSPDYVSQEMVFKTLGTDVVKSAFEGYNACVFAYGQTGSGKSYTMMGNSGDSGLIPRICEGLFSRINETTRWDEASFRTEVSYLEIYNERVRDLLRRKSSKTFNLRVREHPKEGPYVEDLSKHLVQNYGDVEELMDAGNINRTTAATGMNDVSSRSHAIFTIKFTQAKFDSEMPCETVSKIHLVDLAGSERADATGATGVRLKEGGNINKSLVTLGNVISALADLSQDAANTLAKKKQVFVPYRDSVLTWLLKDSLGGNSKTIMIATISPADVNYGETLSTLRYANRAKNIINKPTINEDANVKLIRELRAEIARLKTLLAQGNQIALLDSPTYTDIEMNRLGKGAPGSAGSAAGSGMASNDYTQQATQSYGAYPTQPGQGYSQQSSQPYGQQSYSGYSQSTDTSGYGQSSYSSYGQSQNTGYGTQSTPQGYGSTGGYGSSQSSQSSYGQQSSYPGYGQQPAPSSTSGSYGSSSQSSSYGQPQSGSYSQQPSYGGQQQSYGQQQSYNPPQGYGQQNQYNSSSGGGGGGGGGGNYGQDQSSMSSGGGSGGGYGNQDQSGGGGSGGYGQQDRGGRGRGGSGGGGGGGGGGYNRSSGGYEPRGRGGGRGGRGGMGGSDRGGFNKFGGPRDQGSRHDSEQDNSDNNTIFVQGLGENVTIESVADYFKQIGIIKTNKKTGQPMINLYTDRETGKLKGEATVSFDDPPSAKAAIDWFDGKEFSGNPIKVSFATRRADFNRGGGNGRGGRGRGGPMGRGGYGGGGSGGGGRGGFPSGGGGGGGQQRAGDWKCPNPTCENMNFSWRNECNQCKAPKPDGPGGGPGGSHMGGNYGDDRRGGRGGDYKDDDDKGTGAPGSAGSAAGSGACPVPLQLPPLERLTLDDKKPLNTLISATGLWMSRTGTIHKIKHHEVSRSKIYIEMACGDHLVVNNSRSSRTARALRHHKYRKTCKRCRVSDEDLNKFLTKANEDQTSVKVKVVSAPTRTKKAMPKSVARAPKPLENTEAAQAQPSGSKFSPAIPVSTQESVSVPASVSTSISSISTGATASALVKGNTNPITSMSAPVQASAPALTKSQTDRLEVLLNPKDEISLNSGKPFRELESELLSRRKKDLQQIYAEERENYLGKLEREITRFFVDRGFLEIKSPILIPLEYIERMGIDNDTELSKQIFRVDKNFCLRPMLTPNLYNYLRKLDRALPDPIKIFEIGPCYRKESDGKEHLEEFTMLVFWQMGSGCTRENLESIITDFLNHLGIDFKIVGDSCMVFGDTLDVMHGDLELSSALVGPIPLDREWGIDKPWIGAGFGLERLLKVKHDFKNIKRAARSESYYNGISTNL

SEQ ID NO: 647 - DNA, 2928 bp, Artificial Sequence
  Description of Artificial Sequence: Synthetic polynucleotide
  LCK::FUS::OMeRS
atgggctgcgtgtgcagcagcaaccccgagggtaccgagctcgcctcaaacgattatacccaacaagcaacccaaagctatggggcctaccccacccagcccgggcagggctattcccagcagagcagtcagccctacggacagcagagttacagtggttatagccagtccacggacacttcaggatatggccagagcagctattcttcttatggccagagccagaacacaggctatggaactcagtcaactccccagggatatggctcgactggcggctatggcagtagccagagctcccaatcgtcttacgggcagcagtcctcctaccctggctatggccagcagccagctcccagcagcacctcgggaagttacggtagcagttctcagagcagcagctatgggcagccccagagtgggagctacagccagcagcctagctatggtggacagcagcaaagctatggacagcagcaaagctataatccccctcagggctatggacagcagaaccagtacaacagcagcagtggtggtggaggtggaggtggaggtggaggtaactatggccaagatcaatcctccatgagtagtggtggtggcagtggtggcggttatggcaatcaagaccagagtggtggaggtggcagcggtggctatggacagcaggaccgtggaggccgcggcaggggtggcagtggtggcggcggcggcggcggcggtggtggttacaaccgcagcagtggtggctatgaacccagaggtcgtggaggtggccgtggaggcagaggtggcatgggcggaagtgaccgtggtggcttcaataaatttggtggccctcgggaccaaggatcacgtcatgactccgaacaggataattcagacaacaacaccatctttgtgcaaggcctgggtgagaatgttacaattgagtctgtggctgattacttcaagcagattggtattattaagacaaacaagaaaacgggacagcccatgattaatttgtacacagacagggaaactggcaagctgaagggagaggcaacggtctcttttgatgacccaccttcagctaaagcagctattgactggtttgatggtaaagaattctccggaaatcctatcaaggtctcatttgctactcgccgggcagactttaatcggggtggtggcaatggtcgtggaggccgagggcgaggaggacccatgggccgtggaggctatggaggtggtggcagtggtggtggtggccgaggaggatttcccagtggaggtggtggcggtggaggacagcagcgagctggtgactggaagtgtcctaatcccacctgtgagaatatgaacttctcttggaggaatgaatgcaaccagtgtaaggcccctaaaccagatggcccaggagggggaccaggtggctctcacatggggggtaactacggggatgatcgtcgtggtggcagaggaggcggcgcccccggctccgccggctccgccgccggctccggcatggcgtgcccggtgccgctgcagctgccgccgctggaacgcctgaccctggatgataaaaaaccgctgaataccctgatctctgctactggtctgtggatgagtcgtaccggaaccattcataaaatcaaacaccacgaggttagccgttcgaaaatctatattgagatggcgtgtggcgatcatctggttgtgaacaatagccgctcttctcgtacagcacgtgcactgcgtcaccacaaatatcgtaaaacctgtaaacgttgccgtgtgtccgatgaggatctgaacaaattcctgacaaaagccaatgaggaccaaacaagcgtgaaagtgaaagtcgttagcgctcctacccgtactaaaaaagcaatgccgaaatccgttgctcgtgcccctaaaccactggaaaacactgaagcagcacaggcacagccgtctggaagcaaattctctccggccattcctgtttctacccaggagtccgtttctgttccagcaagtgtgagcaccagcattagcagtattagcaccggtgccaccgctagcgccctggttaaaggcaataccaatccgattacaagcatgtctgccccggttcaagcatcagctccagcactgacaaaatcccaaaccgatcgtctggaggttctgctgaatccgaaagacgaaatcagcctgaattccggcaaaccgtttcgtgaactggagagcgaactgctgtcacgtcgtaaaaaagacctgcaacaaatctatgccgaagaacgtgagaactatctggggaaactggaacgtgaaatcacccgctttttcgtggatcgtggctttctggagatcaaatccccgattctgattcctctggagtatatcgagcgtatgggcatcgacaatgataccgaactgagcaaacaaattttccgtgtggataaaaacttctgtctgcgccctatgctaacaccaaatctgtataactatctgcgcaaactggaccgtgccctgcctgatcctatcaaaatcttcgagatcggcccgtgttatcgtaaagagtccgacggtaaagaacatctggaggagtttaccatgctggtcttttggcaaatgggttcaggttgtactcgtgagaacctggaaagcatcatcaccgattttctgaaccacctgggcattgacttcaaaattgtgggcgacagctgtatggtgtttggcgacaccctggatgtcatgcacggcgacctggaactgtctagtgcccttgtgggcccaatcccgctggatcgtgagtggggtatcgacaaaccttggatcggtgcgggttttggtctggagcgtctgctgaaagtaaaacacgacttcaagaacatcaaacgtgctgcacgttccgagtcctattacaatggtatttctactaacctgtaa

SEQ ID NO: 648 - protein, 975 aa, Artificial Sequence
  Description of Artificial Sequence: Synthetic polypeptide
  LCK::FUS::OMeRS
MGCVCSSNPEGTELASNDYTQQATQSYGAYPTQPGQGYSQQSSQPYGQQSYSGYSQSTDTSGYGQSSYSSYGQSQNTGYGTQSTPQGYGSTGGYGSSQSSQSSYGQQSSYPGYGQQPAPSSTSGSYGSSSQSSSYGQPQSGSYSQQPSYGGQQQSYGQQQSYNPPQGYGQQNQYNSSSGGGGGGGGGGNYGQDQSSMSSGGGSGGGYGNQDQSGGGGSGGYGQQDRGGRGRGGSGGGGGGGGGGYNRSSGGYEPRGRGGGRGGRGGMGGSDRGGFNKFGGPRDQGSRHDSEQDNSDNNTIFVQGLGENVTIESVADYFKQIGIIKTNKKTGQPMINLYTDRETGKLKGEATVSFDDPPSAKAAIDWFDGKEFSGNPIKVSFATRRADFNRGGGNGRGGRGRGGPMGRGGYGGGGSGGGGRGGFPSGGGGGGGQQRAGDWKCPNPTCENMNFSWRNECNQCKAPKPDGPGGGPGGSHMGGNYGDDRRGGRGGGAPGSAGSAAGSGMACPVPLQLPPLERLTLDDKKPLNTLISATGLWMSRTGTIHKIKHHEVSRSKIYIEMACGDHLVVNNSRSSRTARALRHHKYRKTCKRCRVSDEDLNKFLTKANEDQTSVKVKVVSAPTRTKKAMPKSVARAPKPLENTEAAQAQPSGSKFSPAIPVSTQESVSVPASVSTSISSISTGATASALVKGNTNPITSMSAPVQASAPALTKSQTDRLEVLLNPKDEISLNSGKPFRELESELLSRRKKDLQQIYAEERENYLGKLEREITRFFVDRGFLEIKSPILIPLEYIERMGIDNDTELSKQIFRVDKNFCLRPMLTPNLYNYLRKLDRALPDPIKIFEIGPCYRKESDGKEHLEEFTMLVFWQMGSGCTRENLESIITDFLNHLGIDFKIVGDSCMVFGDTLDVMHGDLELSSALVGPIPLDREWGIDKPWIGAGFGLERLLKVKHDFKNIKRAARSESYYNGISTNL

SEQ ID NO: 649 - DNA, 3051 bp, Artificial Sequence
  Description of Artificial Sequence: Synthetic polynucleotide
  EBAG91-29:FUS::OMeRS
atggccatcacccagtttcggttatttaaattttgtacctgcctagcaacagtattctcattcctaaagagattaatatgcagatctggagcacccggctccgccggctccgccgccggctccggcatggcctcaaacgattatacccaacaagcaacccaaagctatggggcctaccccacccagcccgggcagggctattcccagcagagcagtcagccctacggacagcagagttacagtggttatagccagtccacggacacttcaggatatggccagagcagctattcttcttatggccagagccagaacacaggctatggaactcagtcaactccccagggatatggctcgactggcggctatggcagtagccagagctcccaatcgtcttacgggcagcagtcctcctaccctggctatggccagcagccagctcccagcagcacctcgggaagttacggtagcagttctcagagcagcagctatgggcagccccagagtgggagctacagccagcagcctagctatggtggacagcagcaaagctatggacagcagcaaagctataatccccctcagggctatggacagcagaaccagtacaacagcagcagtggtggtggaggtggaggtggaggtggaggtaactatggccaagatcaatcctccatgagtagtggtggtggcagtggtggcggttatggcaatcaagaccagagtggtggaggtggcagcggtggctatggacagcaggaccgtggaggccgcggcaggggtggcagtggtggcggcggcggcggcggcggtggtggttacaaccgcagcagtggtggctatgaacccagaggtcgtggaggtggccgtggaggcagaggtggcatgggcggaagtgaccgtggtggcttcaataaatttggtggccctcgggaccaaggatcacgtcatgactccgaacaggataattcagacaacaacaccatctttgtgcaaggcctgggtgagaatgttacaattgagtctgtggctgattacttcaagcagattggtattattaagacaaacaagaaaacgggacagcccatgattaatttgtacacagacagggaaactggcaagctgaagggagaggcaacggtctcttttgatgacccaccttcagctaaagcagctattgactggtttgatggtaaagaattctccggaaatcctatcaaggtctcatttgctactcgccgggcagactttaatcggggtggtggcaatggtcgtggaggccgagggcgaggaggacccatgggccgtggaggctatggaggtggtggcagtggtggtggtggccgaggaggatttcccagtggaggtggtggcggtggaggacagcagcgagctggtgactggaagtgtcctaatcccacctgtgagaatatgaacttctcttggaggaatgaatgcaaccagtgtaaggcccctaaaccagatggcccaggagggggaccaggtggctctcacatggggggtaactacggggatgatcgtcgtggtggcagaggtggtgcgatcgcaggcgccgattacaaggacgatgatgacaagggagcaccaggaagtgctggttctgctgctggtagtggagcgtgcccggtgccgctgcagctgccgccgctggaacgcctgaccctggatgataaaaaaccgctgaataccctgatctctgctactggtctgtggatgagtcgtaccggaaccattcataaaatcaaacaccacgaggttagccgttcgaaaatctatattgagatggcgtgtggcgatcatctggttgtgaacaatagccgctcttctcgtacagcacgtgcactgcgtcaccacaaatatcgtaaaacctgtaaacgttgccgtgtgtccgatgaggatctgaacaaattcctgacaaaagccaatgaggaccaaacaagcgtgaaagtgaaagtcgttagcgctcctacccgtactaaaaaagcaatgccgaaatccgttgctcgtgcccctaaaccactggaaaacactgaagcagcacaggcacagccgtctggaagcaaattctctccggccattcctgtttctacccaggagtccgtttctgttccagcaagtgtgagcaccagcattagcagtattagcaccggtgccaccgctagcgccctggttaaaggcaataccaatccgattacaagcatgtctgccccggttcaagcatcagctccagcactgacaaaatcccaaaccgatcgtctggaggttctgctgaatccgaaagacgaaatcagcctgaattccggcaaaccgtttcgtgaactggagagcgaactgctgtcacgtcgtaaaaaagacctgcagcaaatctatgccgaagaacgtgagaactatctggggaaactggaacgtgaaatcacccgctttttcgtggatcgtggctttctggagatcaaatccccgattctgattcctctggagtatatcgagcgtatgggcatcgacaatgataccgaactgagcaaacaaattttccgtgtggataaaaacttctgtctgcgccctatgctaacaccaaatctgtataactatctgcgcaaactggaccgtgccctgcctgatcctatcaaaatcttcgagatcggcccgtgttatcgtaaagagtccgacggtaaagaacatctggaggagtttaccatgctggtcttttggcaaatgggttcaggttgtactcgtgagaacctggaaagcatcatcaccgattttctgaaccacctgggcattgacttcaaaattgtgggcgacagctgtatggtgtttggcgacaccctggatgtcatgcacggcgacctggaactgtctagtgcccttgtgggcccaatcccgctggatcgtgagtggggtatcgacaaaccttggatcggtgcgggttttggtctggagcgtctgctgaaagtaaaacacgacttcaagaacatcaaacgtgctgcacgttccgagtcctattacaatggtatttctactaacctgtaa

SEQ ID NO: 650 - protein, 1016 aa, Artificial Sequence
  Description of Artificial Sequence: Synthetic polypeptide
  EBAG91-29:FUS::OMeRS
MAITQFRLFKFCTCLATVFSFLKRLICRSGAPGSAGSAAGSGMASNDYTQQATQSYGAYPTQPGQGYSQQSSQPYGQQSYSGYSQSTDTSGYGQSSYSSYGQSQNTGYGTQSTPQGYGSTGGYGSSQSSQSSYGQQSSYPGYGQQPAPSSTSGSYGSSSQSSSYGQPQSGSYSQQPSYGGQQQSYGQQQSYNPPQGYGQQNQYNSSSGGGGGGGGGGNYGQDQSSMSSGGGSGGGYGNQDQSGGGGSGGYGQQDRGGRGRGGSGGGGGGGGGGYNRSSGGYEPRGRGGGRGGRGGMGGSDRGGFNKFGGPRDQGSRHDSEQDNSDNNTIFVQGLGENVTIESVADYFKQIGIIKTNKKTGQPMINLYTDRETGKLKGEATVSFDDPPSAKAAIDWFDGKEFSGNPIKVSFATRRADFNRGGGNGRGGRGRGGPMGRGGYGGGGSGGGGRGGFPSGGGGGGGQQRAGDWKCPNPTCENMNFSWRNECNQCKAPKPDGPGGGPGGSHMGGNYGDDRRGGRGGAIAGADYKDDDDKGAPGSAGSAAGSGACPVPLQLPPLERLTLDDKKPLNTLISATGLWMSRTGTIHKIKHHEVSRSKIYIEMACGDHLVVNNSRSSRTARALRHHKYRKTCKRCRVSDEDLNKFLTKANEDQTSVKVKVVSAPTRTKKAMPKSVARAPKPLENTEAAQAQPSGSKFSPAIPVSTQESVSVPASVSTSISSISTGATASALVKGNTNPITSMSAPVQASAPALTKSQTDRLEVLLNPKDEISLNSGKPFRELESELLSRRKKDLQQIYAEERENYLGKLEREITRFFVDRGFLEIKSPILIPLEYIERMGIDNDTELSKQIFRVDKNFCLRPMLTPNLYNYLRKLDRALPDPIKIFEIGPCYRKESDGKEHLEEFTMLVFWQMGSGCTRENLESIITDFLNHLGIDFKIVGDSCMVFGDTLDVMHGDLELSSALVGPIPLDREWGIDKPWIGAGFGLERLLKVKHDFKNIKRAARSESYYNGISTNL

SEQ ID NO: 651 - DNA, 3288 bp, Artificial Sequence
  Description of Artificial Sequence: Synthetic polynucleotide
  TOM20::FUS::SYNZIP1::OMeRS
atggtgggtcggaacagcgccatcgccgccggtgtatgcggggcccttttcattgggtactgcatctacttcgaccgcaaaagacgaagtgaccccaacttcaagaacaggcttcgagaacgaagaaagaaacagaagcttgccaaggagagagctgggctttccaagttacctgaccttaaagatgctgaagctgttcagaaattcttcatggcctcaaacgattatacccaacaagcaacccaaagctatggggcctaccccacccagcccgggcagggctattcccagcagagcagtcagccctacggacagcagagttacagtggttatagccagtccacggacacttcaggatatggccagagcagctattcttcttatggccagagccagaacacaggctatggaactcagtcaactccccagggatatggctcgactggcggctatggcagtagccagagctcccaatcgtcttacgggcagcagtcctcctaccctggctatggccagcagccagctcccagcagcacctcgggaagttacggtagcagttctcagagcagcagctatgggcagccccagagtgggagctacagccagcagcctagctatggtggacagcagcaaagctatggacagcagcaaagctataatccccctcagggctatggacagcagaaccagtacaacagcagcagtggtggtggaggtggaggtggaggtggaggtaactatggccaagatcaatcctccatgagtagtggtggtggcagtggtggcggttatggcaatcaagaccagagtggtggaggtggcagcggtggctatggacagcaggaccgtggaggccgcggcaggggtggcagtggtggcggcggcggcggcggcggtggtggttacaaccgcagcagtggtggctatgaacccagaggtcgtggaggtggccgtggaggcagaggtggcatgggcggaagtgaccgtggtggcttcaataaatttggtggccctcgggaccaaggatcacgtcatgactccgaacaggataattcagacaacaacaccatctttgtgcaaggcctgggtgagaatgttacaattgagtctgtggctgattacttcaagcagattggtattattaagacaaacaagaaaacgggacagcccatgattaatttgtacacagacagggaaactggcaagctgaagggagaggcaacggtctcttttgatgacccaccttcagctaaagcagctattgactggtttgatggtaaagaattctccggaaatcctatcaaggtctcatttgctactcgccgggcagactttaatcggggtggtggcaatggtcgtggaggccgagggcgaggaggacccatgggccgtggaggctatggaggtggtggcagtggtggtggtggccgaggaggatttcccagtggaggtggtggcggtggaggacagcagcgagctggtgactggaagtgtcctaatcccacctgtgagaatatgaacttctcttggaggaatgaatgcaaccagtgtaaggcccctaaaccagatggcccaggagggggaccaggtggctctcacatggggggtaactacggggatgatcgtcgtggtggcagaggaggcgcgatcgcaaatctggtggcccagctggaaaacgaggtggccagcctggaaaacgagaacgaaaccctgaagaaaaagaacctgcacaagaaggacctgatcgcctacctggaaaaggaaatcgccaacctgagaaagaagatcgaggaaggcaagcctattcccaaccccctgctgggcctggatagcaccggagcaccaggaagtgctggttctgctgctggtagtggagcgtgcccggtgccgctgcagctgccgccgctggaacgcctgaccctggatgataaaaaaccgctgaataccctgatctctgctactggtctgtggatgagtcgtaccggaaccattcataaaatcaaacaccacgaggttagccgttcgaaaatctatattgagatggcgtgtggcgatcatctggttgtgaacaatagccgctcttctcgtacagcacgtgcactgcgtcaccacaaatatcgtaaaacctgtaaacgttgccgtgtgtccgatgaggatctgaacaaattcctgacaaaagccaatgaggaccaaacaagcgtgaaagtgaaagtcgttagcgctcctacccgtactaaaaaagcaatgccgaaatccgttgctcgtgcccctaaaccactggaaaacactgaagcagcacaggcacagccgtctggaagcaaattctctccggccattcctgtttctacccaggagtccgtttctgttccagcaagtgtgagcaccagcattagcagtattagcaccggtgccaccgctagcgccctggttaaaggcaataccaatccgattacaagcatgtctgccccggttcaagcatcagctccagcactgacaaaatcccaaaccgatcgtctggaggttctgctgaatccgaaagacgaaatcagcctgaattccggcaaaccgtttcgtgaactggagagcgaactgctgtcacgtcgtaaaaaagacctgcaacaaatctatgccgaagaacgtgagaactatctggggaaactggaacgtgaaatcacccgctttttcgtggatcgtggctttctggagatcaaatccccgattctgattcctctggagtatatcgagcgtatgggcatcgacaatgataccgaactgagcaaacaaattttccgtgtggataaaaacttctgtctgcgccctatgctaacaccaaatctgtataactatctgcgcaaactggaccgtgccctgcctgatcctatcaaaatcttcgagatcggcccgtgttatcgtaaagagtccgacggtaaagaacatctggaggagtttaccatgctggtcttttggcaaatgggttcaggttgtactcgtgagaacctggaaagcatcatcaccgattttctgaaccacctgggcattgacttcaaaattgtgggcgacagctgtatggtgtttggcgacaccctggatgtcatgcacggcgacctggaactgtctagtgcccttgtgggcccaatcccgctggatcgtgagtggggtatcgacaaaccttggatcggtgcgggttttggtctggagcgtctgctgaaagtaaaacacgacttcaagaacatcaaacgtgctgcacgttccgagtcctattacaatggtatttctactaacctgtaa

SEQ ID NO: 652 - protein, 1095 aa, Artificial Sequence
  Description of Artificial Sequence: Synthetic polypeptide
  TOM20::FUS::SYNZIP1::OMeRS
MVGRNSAIAAGVCGALFIGYCIYFDRKRRSDPNFKNRLRERRKKQKLAKERAGLSKLPDLKDAEAVQKFFMASNDYTQQATQSYGAYPTQPGQGYSQQSSQPYGQQSYSGYSQSTDTSGYGQSSYSSYGQSQNTGYGTQSTPQGYGSTGGYGSSQSSQSSYGQQSSYPGYGQQPAPSSTSGSYGSSSQSSSYGQPQSGSYSQQPSYGGQQQSYGQQQSYNPPQGYGQQNQYNSSSGGGGGGGGGGNYGQDQSSMSSGGGSGGGYGNQDQSGGGGSGGYGQQDRGGRGRGGSGGGGGGGGGGYNRSSGGYEPRGRGGGRGGRGGMGGSDRGGFNKFGGPRDQGSRHDSEQDNSDNNTIFVQGLGENVTIESVADYFKQIGIIKTNKKTGQPMINLYTDRETGKLKGEATVSFDDPPSAKAAIDWFDGKEFSGNPIKVSFATRRADFNRGGGNGRGGRGRGGPMGRGGYGGGGSGGGGRGGFPSGGGGGGGQQRAGDWKCPNPTCENMNFSWRNECNQCKAPKPDGPGGGPGGSHMGGNYGDDRRGGRGGAIANLVAQLENEVASLENENETLKKKNLHKKDLIAYLEKEIANLRKKIEEGKPIPNPLLGLDSTGAPGSAGSAAGSGACPVPLQLPPLERLTLDDKKPLNTLISATGLWMSRTGTIHKIKHHEVSRSKIYIEMACGDHLVVNNSRSSRTARALRHHKYRKTCKRCRVSDEDLNKFLTKANEDQTSVKVKVVSAPTRTKKAMPKSVARAPKPLENTEAAQAQPSGSKFSPAIPVSTQESVSVPASVSTSISSISTGATASALVKGNTNPITSMSAPVQASAPALTKSQTDRLEVLLNPKDEISLNSGKPFRELESELLSRRKKDLQQIYAEERENYLGKLEREITRFFVDRGFLEIKSPILIPLEYIERMGIDNDTELSKQIFRVDKNFCLRPMLTPNLYNYLRKLDRALPDPIKIFEIGPCYRKESDGKEHLEEFTMLVFWQMGSGCTRENLESIITDFLNHLGIDFKIVGDSCMVFGDTLDVMHGDLELSSALVGPIPLDREWGIDKPWIGAGFGLERLLKVKHDFKNIKRAARSESYYNGISTNL

SEQ ID NO: 653 - DNA, 3273 bp, Artificial Sequence
  Description of Artificial Sequence: Synthetic polynucleotide
  TOM20::FUS::SYNZIP3::OMeRS
atggtgggtcggaacagcgccatcgccgccggtgtatgcggggcccttttcattgggtactgcatctacttcgaccgcaaaagacgaagtgaccccaacttcaagaacaggcttcgagaacgaagaaagaaacagaagcttgccaaggagagagctgggctttccaagttacctgaccttaaagatgctgaagctgttcagaaattcttcatggcctcaaacgattatacccaacaagcaacccaaagctatggggcctaccccacccagcccgggcagggctattcccagcagagcagtcagccctacggacagcagagttacagtggttatagccagtccacggacacttcaggatatggccagagcagctattcttcttatggccagagccagaacacaggctatggaactcagtcaactccccagggatatggctcgactggcggctatggcagtagccagagctcccaatcgtcttacgggcagcagtcctcctaccctggctatggccagcagccagctcccagcagcacctcgggaagttacggtagcagttctcagagcagcagctatgggcagccccagagtgggagctacagccagcagcctagctatggtggacagcagcaaagctatggacagcagcaaagctataatccccctcagggctatggacagcagaaccagtacaacagcagcagtggtggtggaggtggaggtggaggtggaggtaactatggccaagatcaatcctccatgagtagtggtggtggcagtggtggcggttatggcaatcaagaccagagtggtggaggtggcagcggtggctatggacagcaggaccgtggaggccgcggcaggggtggcagtggtggcggcggcggcggcggcggtggtggttacaaccgcagcagtggtggctatgaacccagaggtcgtggaggtggccgtggaggcagaggtggcatgggcggaagtgaccgtggtggcttcaataaatttggtggccctcgggaccaaggatcacgtcatgactccgaacaggataattcagacaacaacaccatctttgtgcaaggcctgggtgagaatgttacaattgagtctgtggctgattacttcaagcagattggtattattaagacaaacaagaaaacgggacagcccatgattaatttgtacacagacagggaaactggcaagctgaagggagaggcaacggtctcttttgatgacccaccttcagctaaagcagctattgactggtttgatggtaaagaattctccggaaatcctatcaaggtctcatttgctactcgccgggcagactttaatcggggtggtggcaatggtcgtggaggccgagggcgaggaggacccatgggccgtggaggctatggaggtggtggcagtggtggtggtggccgaggaggatttcccagtggaggtggtggcggtggaggacagcagcgagctggtgactggaagtgtcctaatcccacctgtgagaatatgaacttctcttggaggaatgaatgcaaccagtgtaaggcccctaaaccagatggcccaggagggggaccaggtggctctcacatggggggtaactacggggatgatcgtcgtggtggcagaggaggcgcgatcgcaaatgaggtgaccaccctggaaaacgacgccgccttcatcgagaacgagaacgcctacctggaaaaagagatcgccagactgagaaaggaaaaggccgctctgcggaacagactggcccacaagaagggcaagcctattcccaaccccctgctgggcctggatagcaccggagcaccaggaagtgctggttctgctgctggtagtggagcgtgcccggtgccgctgcagctgccgccgctggaacgcctgaccctggatgataaaaaaccgctgaataccctgatctctgctactggtctgtggatgagtcgtaccggaaccattcataaaatcaaacaccacgaggttagccgttcgaaaatctatattgagatggcgtgtggcgatcatctggttgtgaacaatagccgctcttctcgtacagcacgtgcactgcgtcaccacaaatatcgtaaaacctgtaaacgttgccgtgtgtccgatgaggatctgaacaaattcctgacaaaagccaatgaggaccaaacaagcgtgaaagtgaaagtcgttagcgctcctacccgtactaaaaaagcaatgccgaaatccgttgctcgtgcccctaaaccactggaaaacactgaagcagcacaggcacagccgtctggaagcaaattctctccggccattcctgtttctacccaggagtccgtttctgttccagcaagtgtgagcaccagcattagcagtattagcaccggtgccaccgctagcgccctggttaaaggcaataccaatccgattacaagcatgtctgccccggttcaagcatcagctccagcactgacaaaatcccaaaccgatcgtctggaggttctgctgaatccgaaagacgaaatcagcctgaattccggcaaaccgtttcgtgaactggagagcgaactgctgtcacgtcgtaaaaaagacctgcaacaaatctatgccgaagaacgtgagaactatctggggaaactggaacgtgaaatcacccgctttttcgtggatcgtggctttctggagatcaaatccccgattctgattcctctggagtatatcgagcgtatgggcatcgacaatgataccgaactgagcaaacaaattttccgtgtggataaaaacttctgtctgcgccctatgctaacaccaaatctgtataactatctgcgcaaactggaccgtgccctgcctgatcctatcaaaatcttcgagatcggcccgtgttatcgtaaagagtccgacggtaaagaacatctggaggagtttaccatgctggtcttttggcaaatgggttcaggttgtactcgtgagaacctggaaagcatcatcaccgattttctgaaccacctgggcattgacttcaaaattgtgggcgacagctgtatggtgtttggcgacaccctggatgtcatgcacggcgacctggaactgtctagtgcccttgtgggcccaatcccgctggatcgtgagtggggtatcgacaaaccttggatcggtgcgggttttggtctggagcgtctgctgaaagtaaaacacgacttcaagaacatcaaacgtgctgcacgttccgagtcctattacaatggtatttctactaacctgtaa

SEQ ID NO: 654 - protein, 1090 aa, Artificial Sequence
  Description of Artificial Sequence: Synthetic polypeptide
  TOM20::FUS::SYNZIP3::OMeRS
MVGRNSAIAAGVCGALFIGYCIYFDRKRRSDPNFKNRLRERRKKQKLAKERAGLSKLPDLKDAEAVQKFFMASNDYTQQATQSYGAYPTQPGQGYSQQSSQPYGQQSYSGYSQSTDTSGYGQSSYSSYGQSQNTGYGTQSTPQGYGSTGGYGSSQSSQSSYGQQSSYPGYGQQPAPSSTSGSYGSSSQSSSYGQPQSGSYSQQPSYGGQQQSYGQQQSYNPPQGYGQQNQYNSSSGGGGGGGGGGNYGQDQSSMSSGGGSGGGYGNQDQSGGGGSGGYGQQDRGGRGRGGSGGGGGGGGGGYNRSSGGYEPRGRGGGRGGRGGMGGSDRGGFNKFGGPRDQGSRHDSEQDNSDNNTIFVQGLGENVTIESVADYFKQIGIIKTNKKTGQPMINLYTDRETGKLKGEATVSFDDPPSAKAAIDWFDGKEFSGNPIKVSFATRRADFNRGGGNGRGGRGRGGPMGRGGYGGGGSGGGGRGGFPSGGGGGGGQQRAGDWKCPNPTCENMNFSWRNECNQCKAPKPDGPGGGPGGSHMGGNYGDDRRGGRGGAIANEVTTLENDAAFIENENAYLEKEIARLRKEKAALRNRLAHKKGKPIPNPLLGLDSTGAPGSAGSAAGSGACPVPLQLPPLERLTLDDKKPLNTLISATGLWMSRTGTIHKIKHHEVSRSKIYIEMACGDHLVVNNSRSSRTARALRHHKYRKTCKRCRVSDEDLNKFLTKANEDQTSVKVKVVSAPTRTKKAMPKSVARAPKPLENTEAAQAQPSGSKFSPAIPVSTQESVSVPASVSTSISSISTGATASALVKGNTNPITSMSAPVQASAPALTKSQTDRLEVLLNPKDEISLNSGKPFRELESELLSRRKKDLQQIYAEERENYLGKLEREITRFFVDRGFLEIKSPILIPLEYIERMGIDNDTELSKQIFRVDKNFCLRPMLTPNLYNYLRKLDRALPDPIKIFEIGPCYRKESDGKEHLEEFTMLVFWQMGSGCTRENLESIITDFLNHLGIDFKIVGDSCMVFGDTLDVMHGDLELSSALVGPIPLDREWGIDKPWIGAGFGLERLLKVKHDFKNIKRAARSESYYNGISTNL

SEQ ID NO: 655 - DNA, 3141 bp, Artificial Sequence
  Description of Artificial Sequence: Synthetic polynucleotide
  SLP3::FUS::PylRS(AF)
atggattctagggtgtcttcacctgagaagcaagataaagagaatttcgtgggtgtcaacaataaacggcttggtgtatgtggctggatcctgttttccctctctttcctgttggtgatcattaccttccccatctccatatggatgtgcttgaagatcattaaggagtatgaacgtggagcacccggctccgccggctccgccgccggctccggcatggcctcaaacgattatacccaacaagcaacccaaagctatggggcctaccccacccagcccgggcagggctattcccagcagagcagtcagccctacggacagcagagttacagtggttatagccagtccacggacacttcaggatatggccagagcagctattcttcttatggccagagccagaacacaggctatggaactcagtcaactccccagggatatggctcgactggcggctatggcagtagccagagctcccaatcgtcttacgggcagcagtcctcctaccctggctatggccagcagccagctcccagcagcacctcgggaagttacggtagcagttctcagagcagcagctatgggcagccccagagtgggagctacagccagcagcctagctatggtggacagcagcaaagctatggacagcagcaaagctataatccccctcagggctatggacagcagaaccagtacaacagcagcagtggtggtggaggtggaggtggaggtggaggtaactatggccaagatcaatcctccatgagtagtggtggtggcagtggtggcggttatggcaatcaagaccagagtggtggaggtggcagcggtggctatggacagcaggaccgtggaggccgcggcaggggtggcagtggtggcggcggcggcggcggcggtggtggttacaaccgcagcagtggtggctatgaacccagaggtcgtggaggtggccgtggaggcagaggtggcatgggcggaagtgaccgtggtggcttcaataaatttggtggccctcgggaccaaggatcacgtcatgactccgaacaggataattcagacaacaacaccatctttgtgcaaggcctgggtgagaatgttacaattgagtctgtggctgattacttcaagcagattggtattattaagacaaacaagaaaacgggacagcccatgattaatttgtacacagacagggaaactggcaagctgaagggagaggcaacggtctcttttgatgacccaccttcagctaaagcagctattgactggtttgatggtaaagaattctccggaaatcctatcaaggtctcatttgctactcgccgggcagactttaatcggggtggtggcaatggtcgtggaggccgagggcgaggaggacccatgggccgtggaggctatggaggtggtggcagtggtggtggtggccgaggaggatttcccagtggaggtggtggcggtggaggacagcagcgagctggtgactggaagtgtcctaatcccacctgtgagaatatgaacttctcttggaggaatgaatgcaaccagtgtaaggcccctaaaccagatggcccaggagggggaccaggtggctctcacatggggggtaactacggggatgatcgtcgtggtggcagaggtggtgcgatcgcaggcgccgattacaaggacgatgatgacaagggagcaccaggaagtgctggttctgctgctggtagtggagcgtgcccggtgccgctgcagctgccgccgctggaacgcctgaccctggatgataaaaaaccgctgaataccctgatctctgctactggtctgtggatgagtcgtaccggaaccattcataaaatcaaacaccacgaggttagccgttcgaaaatctatattgagatggcgtgtggcgatcatctggttgtgaacaatagccgctcttctcgtacagcacgtgcactgcgtcaccacaaatatcgtaaaacctgtaaacgttgccgtgtgtccgatgaggatctgaacaaattcctgacaaaagccaatgaggaccaaacaagcgtgaaagtgaaagtcgttagcgctcctacccgtactaaaaaagcaatgccgaaatccgttgctcgtgcccctaaaccactggaaaacactgaagcagcacaggcacagccgtctggaagcaaattctctccggccattcctgtttctacccaggagtccgtttctgttccagcaagtgtgagcaccagcattagcagtattagcaccggtgccaccgctagcgccctggttaaaggcaataccaatccgattacaagcatgtctgccccggttcaagcatcagctccagcactgacaaaatcccaaaccgatcgtctggaggttctgctgaatccgaaagacgaaatcagcctgaattccggcaaaccgtttcgtgaactggagagcgaactgctgtcacgtcgtaaaaaagacctgcaacaaatctatgccgaagaacgtgagaactatctggggaaactggaacgtgaaatcacccgctttttcgtggatcgtggctttctggagatcaaatccccgattctgattcctctggagtatatcgagcgtatgggcatcgacaatgataccgaactgagcaaacaaattttccgtgtggataaaaacttctgtctgcgccctatgctagcaccaaatctggctaactatctgcgcaaactggaccgtgccctgcctgatcctatcaaaatcttcgagatcggcccgtgttatcgtaaagagtccgacggtaaagaacatctggaggagtttaccatgctgaacttttgccaaatgggttcaggttgtactcgtgagaacctggaaagcatcatcaccgattttctgaaccacctgggcattgacttcaaaattgtgggcgacagctgtatggtgtttggcgacaccctggatgtcatgcacggcgacctggaactgtctagtgccgttgtgggcccaatcccgctggatcgtgagtggggtatcgacaaaccttggatcggtgcgggttttggtctggagcgtctgctgaaagtaaaacacgacttcaagaacatcaaacgtgctgcacgttccgagtcctattacaatggtatttctactaacctgtaa

SEQ ID NO: 656 - protein, 1046 aa, Artificial Sequence
  Description of Artificial Sequence: Synthetic polypeptide
  SLP3::FUS::PylRS(AF)
MDSRVSSPEKQDKENFVGVNNKRLGVCGWILFSLSFLLVIITFPISIWMCLKIIKEYERGAPGSAGSAAGSGMASNDYTQQATQSYGAYPTQPGQGYSQQSSQPYGQQSYSGYSQSTDTSGYGQSSYSSYGQSQNTGYGTQSTPQGYGSTGGYGSSQSSQSSYGQQSSYPGYGQQPAPSSTSGSYGSSSQSSSYGQPQSGSYSQQPSYGGQQQSYGQQQSYNPPQGYGQQNQYNSSSGGGGGGGGGGNYGQDQSSMSSGGGSGGGYGNQDQSGGGGSGGYGQQDRGGRGRGGSGGGGGGGGGGYNRSSGGYEPRGRGGGRGGRGGMGGSDRGGFNKFGGPRDQGSRHDSEQDNSDNNTIFVQGLGENVTIESVADYFKQIGIIKTNKKTGQPMINLYTDRETGKLKGEATVSFDDPPSAKAAIDWFDGKEFSGNPIKVSFATRRADFNRGGGNGRGGRGRGGPMGRGGYGGGGSGGGGRGGFPSGGGGGGGQQRAGDWKCPNPTCENMNFSWRNECNQCKAPKPDGPGGGPGGSHMGGNYGDDRRGGRGGAIAGADYKDDDDKGAPGSAGSAAGSGACPVPLQLPPLERLTLDDKKPLNTLISATGLWMSRTGTIHKIKHHEVSRSKIYIEMACGDHLVVNNSRSSRTARALRHHKYRKTCKRCRVSDEDLNKFLTKANEDQTSVKVKVVSAPTRTKKAMPKSVARAPKPLENTEAAQAQPSGSKFSPAIPVSTQESVSVPASVSTSISSISTGATASALVKGNTNPITSMSAPVQASAPALTKSQTDRLEVLLNPKDEISLNSGKPFRELESELLSRRKKDLQQIYAEERENYLGKLEREITRFFVDRGFLEIKSPILIPLEYIERMGIDNDTELSKQIFRVDKNFCLRPMLAPNLANYLRKLDRALPDPIKIFEIGPCYRKESDGKEHLEEFTMLNFCQMGSGCTRENLESIITDFLNHLGIDFKIVGDSCMVFGDTLDVMHGDLELSSAVVGPIPLDREWGIDKPWIGAGFGLERLLKVKHDFKNIKRAARSESYYNGISTNL

SEQ ID NO: 657 - DNA, 603 bp, Artificial Sequence
  Description of Artificial Sequence: Synthetic polynucleotide
  SLP3::MCP
atggattctagggtgtcttcacctgagaagcaagataaagagaatttcgtgggtgtcaacaataaacggcttggtgtatgtggctggatcctgttttccctctctttcctgttggtgatcattaccttccccatctccatatggatgtgcttgaagatcattaaggagtatgaacgtgcgatcgcatatccctatgatgtgccggattatgctggagcaccaggaagtgctggttctgctgctggtagtggagcttctaactttactcagttcgttctcgtcgacaatggcggaactggcgacgtgactgtcgccccaagcaacttcgctaacgggatcgctgaatggatcagctctaactcgcgttcacaggcttacaaagtaacctgtagcgttcgtcagagctctgcgcagaatcgcaaatacaccatcaaagtcgaggtgcctaaaggcgcctggcgttcgtacttaaatatggaactaaccattccaattttcgccacgaattccgactgcgagcttattgttaaggcaatgcaaggtctcctaaaagatggaaacccgattccctcagcaatcgcagcaaactccggcatctactaa

SEQ ID NO: 658 - protein, 200 aa, Artificial Sequence
  Description of Artificial Sequence: Synthetic polypeptide
  SLP3::MCP
MDSRVSSPEKQDKENFVGVNNKRLGVCGWILFSLSFLLVIITFPISIWMCLKIIKEYERAIAYPYDVPDYAGAPGSAGSAAGSGASNFTQFVLVDNGGTGDVTVAPSNFANGIAEWISSNSRSQAYKVTCSVRQSSAQNRKYTIKVEVPKGAWRSYLNMELTIPIFATNSDCELIVKAMQGLLKDGNPIPSAIAANSGIY

SEQ ID NO: 659 - DNA, 2487 bp, Artificial Sequence
  Description of Artificial Sequence: Synthetic polynucleotide
  SLP3::EWSR1::MCP
atggattctagggtgtcttcacctgagaagcaagataaagagaatttcgtgggtgtcaacaataaacggcttggtgtatgtggctggatcctgttttccctctctttcctgttggtgatcattaccttccccatctccatatggatgtgcttgaagatcattaaggagtatgaacgtatggcgtccacggattacagtacctatagccaagctgcagcgcagcagggctacagtgcttacaccgcccagcccactcaaggatatgcacagaccacccaggcatatgggcaacaaagctatggaacctatggacagcccactgatgtcagctatacccaggctcagaccactgcaacctatgggcagaccgcctatgcaacttcttatggacagcctcccactggttatactactccaactgccccccaggcatacagccagcctgtccaggggtatggcactggtgcttatgataccaccactgctacagtcaccaccacccaggcctcctatgcagctcagtctgcatatggcactcagcctgcttatccagcctatgggcagcagccagcagccactgcacctacaagaccgcaggatggaaacaagcccactgagactagtcaacctcaatctagcacagggggttacaaccagcccagcctaggatatggacagagtaactacagttatccccaggtacctgggagctaccccatgcagccagtcactgcacctccatcctaccctcctaccagctattcctctacacagccgactagttatgatcagagcagttactctcagcagaacacctatgggcaaccgagcagctatggacagcagagtagctatggtcaacaaagcagctatgggcagcagcctcccactagttacccaccccaaactggatcctacagccaagctccaagtcaatatagccaacagagcagcagctacgggcagcagagttcattccgacaggaccaccccagtagcatgggtgtttatgggcaggagtctggaggattttccggaccaggagagaaccggagcatgagtggccctgataaccggggcaggggaagagggggatttgatcgtggaggcatgagcagaggtgggcggggaggaggacgcggtggaatgggcagcgctggagagcgaggtggcttcaataagcctggtggacccatggatgaaggaccagatcttgatctaggcccacctgtagatccagatgaagactctgacaacagtgcaatttatgtacaaggattaaatgacagtgtgactctagatgatctggcagacttctttaagcagtgtggggttgttaagatgaacaagagaactgggcaacccatgatccacatctacctggacaaggaaacaggaaagcccaaaggcgatgccacagtgtcctatgaagacccacctactgccaaggctgccgtggaatggtttgatgggaaagattttcaagggagcaaacttaaagtctcccttgctcggaagaagcctccaatgaacagtatgcggggtggtctgccaccccgtgagggcagaggcatgccaccaccactccgtggaggtccaggaggcccaggaggtcctgggggacccatgggtcgcatgggaggccgtggaggagatagaggaggcttccctccaagaggaccccggggttcccgagggaacccctctggaggaggaaacgtccagcaccgagctggagactggcagtgtcccaatccgggttgtggaaaccagaacttcgcctggagaacagagtgcaaccagtgtaaggccccaaagcctgaaggcttcctcccgccaccctttccgcccccgggtggtgatcgtggcagaggtggccctggtggcatgcggggaggaagaggtggcctcatggatcgtggtggtcccggtggaatgttcagaggtggccgtggtggagacagaggtggcttccgtggtggccggggcatggaccgaggtggctttggtggaggaagacgaggtggccctggggggccccctggacctttgatggaacaggcgatcgcatatccctatgatgtgccggattatgctggagcaccaggaagtgctggttctgctgctggtagtggagcttctaactttactcagttcgttctcgtcgacaatggcggaactggcgacgtgactgtcgccccaagcaacttcgctaacgggatcgctgaatggatcagctctaactcgcgttcacaggcttacaaagtaacctgtagcgttcgtcagagctctgcgcagaatcgcaaatacaccatcaaagtcgaggtgcctaaaggcgcctggcgttcgtacttaaatatggaactaaccattccaattttcgccacgaattccgactgcgagcttattgttaaggcaatgcaaggtctcctaaaagatggaaacccgattccctcagcaatcgcagcaaactccggcatctactaa

SEQ ID NO: 660 - protein, 828 aa, Artificial Sequence
  Description of Artificial Sequence: Synthetic polypeptide
  SLP3::EWSR1::MCP
MDSRVSSPEKQDKENFVGVNNKRLGVCGWILFSLSFLLVIITFPISIWMCLKIIKEYERMASTDYSTYSQAAAQQGYSAYTAQPTQGYAQTTQAYGQQSYGTYGQPTDVSYTQAQTTATYGQTAYATSYGQPPTGYTTPTAPQAYSQPVQGYGTGAYDTTTATVTTTQASYAAQSAYGTQPAYPAYGQQPAATAPTRPQDGNKPTETSQPQSSTGGYNQPSLGYGQSNYSYPQVPGSYPMQPVTAPPSYPPTSYSSTQPTSYDQSSYSQQNTYGQPSSYGQQSSYGQQSSYGQQPPTSYPPQTGSYSQAPSQYSQQSSSYGQQSSFRQDHPSSMGVYGQESGGFSGPGENRSMSGPDNRGRGRGGFDRGGMSRGGRGGGRGGMGSAGERGGFNKPGGPMDEGPDLDLGPPVDPDEDSDNSAIYVQGLNDSVTLDDLADFFKQCGVVKMNKRTGQPMIHIYLDKETGKPKGDATVSYEDPPTAKAAVEWFDGKDFQGSKLKVSLARKKPPMNSMRGGLPPREGRGMPPPLRGGPGGPGGPGGPMGRMGGRGGDRGGFPPRGPRGSRGNPSGGGNVQHRAGDWQCPNPGCGNQNFAWRTECNQCKAPKPEGFLPPPFPPPGGDRGRGGPGGMRGGRGGLMDRGGPGGMFRGGRGGDRGGFRGGRGMDRGGFGGGRRGGPGGPPGPLMEQAIAYPYDVPDYAGAPGSAGSAAGSGASNFTQFVLVDNGGTGDVTVAPSNFANGIAEWISSNSRSQAYKVTCSVRQSSAQNRKYTIKVEVPKGAWRSYLNMELTIPIFATNSDCELIVKAMQGLLKDGNPIPSAIAANSGIY

SEQ ID NO: 661 - DNA, 2631 bp, Artificial Sequence
  Description of Artificial Sequence: Synthetic polynucleotide
  SLP3::EWSR1::4xlambdaN22
atggattctagggtgtcttcacctgagaagcaagataaagagaatttcgtgggtgtcaacaataaacggcttggtgtatgtggctggatcctgttttccctctctttcctgttggtgatcattaccttccccatctccatatggatgtgcttgaagatcattaaggagtatgaacgtatggcgtccacggattacagtacctatagccaagctgcagcgcagcagggctacagtgcttacaccgcccagcccactcaaggatatgcacagaccacccaggcatatgggcaacaaagctatggaacctatggacagcccactgatgtcagctatacccaggctcagaccactgcaacctatgggcagaccgcctatgcaacttcttatggacagcctcccactggttatactactccaactgccccccaggcatacagccagcctgtccaggggtatggcactggtgcttatgataccaccactgctacagtcaccaccacccaggcctcctatgcagctcagtctgcatatggcactcagcctgcttatccagcctatgggcagcagccagcagccactgcacctacaagaccgcaggatggaaacaagcccactgagactagtcaacctcaatctagcacagggggttacaaccagcccagcctaggatatggacagagtaactacagttatccccaggtacctgggagctaccccatgcagccagtcactgcacctccatcctaccctcctaccagctattcctctacacagccgactagttatgatcagagcagttactctcagcagaacacctatgggcaaccgagcagctatggacagcagagtagctatggtcaacaaagcagctatgggcagcagcctcccactagttacccaccccaaactggatcctacagccaagctccaagtcaatatagccaacagagcagcagctacgggcagcagagttcattccgacaggaccaccccagtagcatgggtgtttatgggcaggagtctggaggattttccggaccaggagagaaccggagcatgagtggccctgataaccggggcaggggaagagggggatttgatcgtggaggcatgagcagaggtgggcggggaggaggacgcggtggaatgggcagcgctggagagcgaggtggcttcaataagcctggtggacccatggatgaaggaccagatcttgatctaggcccacctgtagatccagatgaagactctgacaacagtgcaatttatgtacaaggattaaatgacagtgtgactctagatgatctggcagacttctttaagcagtgtggggttgttaagatgaacaagagaactgggcaacccatgatccacatctacctggacaaggaaacaggaaagcccaaaggcgatgccacagtgtcctatgaagacccacctactgccaaggctgccgtggaatggtttgatgggaaagattttcaagggagcaaacttaaagtctcccttgctcggaagaagcctccaatgaacagtatgcggggtggtctgccaccccgtgagggcagaggcatgccaccaccactccgtggaggtccaggaggcccaggaggtcctgggggacccatgggtcgcatgggaggccgtggaggagatagaggaggcttccctccaagaggaccccggggttcccgagggaacccctctggaggaggaaacgtccagcaccgagctggagactggcagtgtcccaatccgggttgtggaaaccagaacttcgcctggagaacagagtgcaaccagtgtaaggccccaaagcctgaaggcttcctcccgccaccctttccgcccccgggtggtgatcgtggcagaggtggccctggtggcatgcggggaggaagaggtggcctcatggatcgtggtggtcccggtggaatgttcagaggtggccgtggtggagacagaggtggcttccgtggtggccggggcatggaccgaggtggctttggtggaggaagacgaggtggccctggggggccccctggacctttgatggaacaggcgatcgcaggagcaccaggaagtgctggttctgctgctggtagtggagagcagaagctgatctcagaggaggacctgctagccaccatggacgcacaaacacgacgacgtgagcgtcgcgctgagaaacaagctcaatggaaagctgcaaacccaccgctcgacggagccggagctggcgctggagctggagccggagctggcggtctagccaccatggacgcacaaacacgacgacgtgagcgtcgcgctgagaaacaagctcaatggaaagctgcaaacccaccgctcgacggagccggagctggcgctggagctggagccggagctggcggtctagccaccatggacgcacaaacacgacgacgtgagcgtcgcgctgagaaacaagctcaatggaaagctgcaaacccaccgctcgacggagccggagctggcgctggagctggagccggagctggcggtctagccaccatggacgcacaaacacgacgacgtgagcgtcgcgctgagaaacaagctcaatggaaagctgcaaacccaccgctcgagtctagagggcccgtttaa

SEQ ID NO: 662 - protein, 876 aa, Artificial Sequence
  Description of Artificial Sequence: Synthetic polypeptide
  SLP3::EWSR1::4xlambdaN22
MDSRVSSPEKQDKENFVGVNNKRLGVCGWILFSLSFLLVIITFPISIWMCLKIIKEYERMASTDYSTYSQAAAQQGYSAYTAQPTQGYAQTTQAYGQQSYGTYGQPTDVSYTQAQTTATYGQTAYATSYGQPPTGYTTPTAPQAYSQPVQGYGTGAYDTTTATVTTTQASYAAQSAYGTQPAYPAYGQQPAATAPTRPQDGNKPTETSQPQSSTGGYNQPSLGYGQSNYSYPQVPGSYPMQPVTAPPSYPPTSYSSTQPTSYDQSSYSQQNTYGQPSSYGQQSSYGQQSSYGQQPPTSYPPQTGSYSQAPSQYSQQSSSYGQQSSFRQDHPSSMGVYGQESGGFSGPGENRSMSGPDNRGRGRGGFDRGGMSRGGRGGGRGGMGSAGERGGFNKPGGPMDEGPDLDLGPPVDPDEDSDNSAIYVQGLNDSVTLDDLADFFKQCGVVKMNKRTGQPMIHIYLDKETGKPKGDATVSYEDPPTAKAAVEWFDGKDFQGSKLKVSLARKKPPMNSMRGGLPPREGRGMPPPLRGGPGGPGGPGGPMGRMGGRGGDRGGFPPRGPRGSRGNPSGGGNVQHRAGDWQCPNPGCGNQNFAWRTECNQCKAPKPEGFLPPPFPPPGGDRGRGGPGGMRGGRGGLMDRGGPGGMFRGGRGGDRGGFRGGRGMDRGGFGGGRRGGPGGPPGPLMEQAIAGAPGSAGSAAGSGEQKLISEEDLLATMDAQTRRRERRAEKQAQWKAANPPLDGAGAGAGAGAGAGGLATMDAQTRRRERRAEKQAQWKAANPPLDGAGAGAGAGAGAGGLATMDAQTRRRERRAEKQAQWKAANPPLDGAGAGAGAGAGAGGLATMDAQTRRRERRAEKQAQWKAANPPLESRGPV

SEQ ID NO: 663 - DNA, 1659 bp, Artificial Sequence
  Description of Artificial Sequence: Synthetic polynucleotide
  SLP3::PylRS(AF)
atggattctagggtgtcttcacctgagaagcaagataaagagaatttcgtgggtgtcaacaataaacggcttggtgtatgtggctggatcctgttttccctctctttcctgttggtgatcattaccttccccatctccatatggatgtgcttgaagatcattaaggagtatgaacgtggcgccgattacaaggacgatgatgacaagggagcaccaggaagtgctggttctgctgctggtagtggagcgtgcccggtgccgctgcagctgccgccgctggaacgcctgaccctggatgataaaaaaccgctgaataccctgatctctgctactggtctgtggatgagtcgtaccggaaccattcataaaatcaaacaccacgaggttagccgttcgaaaatctatattgagatggcgtgtggcgatcatctggttgtgaacaatagccgctcttctcgtacagcacgtgcactgcgtcaccacaaatatcgtaaaacctgtaaacgttgccgtgtgtccgatgaggatctgaacaaattcctgacaaaagccaatgaggaccaaacaagcgtgaaagtgaaagtcgttagcgctcctacccgtactaaaaaagcaatgccgaaatccgttgctcgtgcccctaaaccactggaaaacactgaagcagcacaggcacagccgtctggaagcaaattctctccggccattcctgtttctacccaggagtccgtttctgttccagcaagtgtgagcaccagcattagcagtattagcaccggtgccaccgctagcgccctggttaaaggcaataccaatccgattacaagcatgtctgccccggttcaagcatcagctccagcactgacaaaatcccaaaccgatcgtctggaggttctgctgaatccgaaagacgaaatcagcctgaattccggcaaaccgtttcgtgaactggagagcgaactgctgtcacgtcgtaaaaaagacctgcaacaaatctatgccgaagaacgtgagaactatctggggaaactggaacgtgaaatcacccgctttttcgtggatcgtggctttctggagatcaaatccccgattctgattcctctggagtatatcgagcgtatgggcatcgacaatgataccgaactgagcaaacaaattttccgtgtggataaaaacttctgtctgcgccctatgctagcaccaaatctggctaactatctgcgcaaactggaccgtgccctgcctgatcctatcaaaatcttcgagatcggcccgtgttatcgtaaagagtccgacggtaaagaacatctggaggagtttaccatgctgaacttttgccaaatgggttcaggttgtactcgtgagaacctggaaagcatcatcaccgattttctgaaccacctgggcattgacttcaaaattgtgggcgacagctgtatggtgtttggcgacaccctggatgtcatgcacggcgacctggaactgtctagtgccgttgtgggcccaatcccgctggatcgtgagtggggtatcgacaaaccttggatcggtgcgggttttggtctggagcgtctgctgaaagtaaaacacgacttcaagaacatcaaacgtgctgcacgttccgagtcctattacaatggtatttctactaacctgtaa

SEQ ID NO: 664 - protein, 552 aa, Artificial Sequence
  Description of Artificial Sequence: Synthetic polypeptide
  SLP3::PylRS(AF)
MDSRVSSPEKQDKENFVGVNNKRLGVCGWILFSLSFLLVIITFPISIWMCLKIIKEYERGADYKDDDDKGAPGSAGSAAGSGACPVPLQLPPLERLTLDDKKPLNTLISATGLWMSRTGTIHKIKHHEVSRSKIYIEMACGDHLVVNNSRSSRTARALRHHKYRKTCKRCRVSDEDLNKFLTKANEDQTSVKVKVVSAPTRTKKAMPKSVARAPKPLENTEAAQAQPSGSKFSPAIPVSTQESVSVPASVSTSISSISTGATASALVKGNTNPITSMSAPVQASAPALTKSQTDRLEVLLNPKDEISLNSGKPFRELESELLSRRKKDLQQIYAEERENYLGKLEREITRFFVDRGFLEIKSPILIPLEYIERMGIDNDTELSKQIFRVDKNFCLRPMLAPNLANYLRKLDRALPDPIKIFEIGPCYRKESDGKEHLEEFTMLNFCQMGSGCTRENLESIITDFLNHLGIDFKIVGDSCMVFGDTLDVMHGDLELSSAVVGPIPLDREWGIDKPWIGAGFGLERLLKVKHDFKNIKRAARSESYYNGISTNL

SEQ ID NO: 665 - DNA, 3549 bp, Artificial Sequence
  Description of Artificial Sequence: Synthetic polynucleotide
  TOM20::FUS::MCP::PylRS(AF)
atggtgggtcggaacagcgccatcgccgccggtgtatgcggggcccttttcattgggtactgcatctacttcgaccgcaaaagacgaagtgaccccaacttcaagaacaggcttcgagaacgaagaaagaaacagaagcttgccaaggagagagctgggctttccaagttacctgaccttaaagatgctgaagctgttcagaaattcttcatggcctcaaacgattatacccaacaagcaacccaaagctatggggcctaccccacccagcccgggcagggctattcccagcagagcagtcagccctacggacagcagagttacagtggttatagccagtccacggacacttcaggatatggccagagcagctattcttcttatggccagagccagaacacaggctatggaactcagtcaactccccagggatatggctcgactggcggctatggcagtagccagagctcccaatcgtcttacgggcagcagtcctcctaccctggctatggccagcagccagctcccagcagcacctcgggaagttacggtagcagttctcagagcagcagctatgggcagccccagagtgggagctacagccagcagcctagctatggtggacagcagcaaagctatggacagcagcaaagctataatccccctcagggctatggacagcagaaccagtacaacagcagcagtggtggtggaggtggaggtggaggtggaggtaactatggccaagatcaatcctccatgagtagtggtggtggcagtggtggcggttatggcaatcaagaccagagtggtggaggtggcagcggtggctatggacagcaggaccgtggaggccgcggcaggggtggcagtggtggcggcggcggcggcggcggtggtggttacaaccgcagcagtggtggctatgaacccagaggtcgtggaggtggccgtggaggcagaggtggcatgggcggaagtgaccgtggtggcttcaataaatttggtggccctcgggaccaaggatcacgtcatgactccgaacaggataattcagacaacaacaccatctttgtgcaaggcctgggtgagaatgttacaattgagtctgtggctgattacttcaagcagattggtattattaagacaaacaagaaaacgggacagcccatgattaatttgtacacagacagggaaactggcaagctgaagggagaggcaacggtctcttttgatgacccaccttcagctaaagcagctattgactggtttgatggtaaagaattctccggaaatcctatcaaggtctcatttgctactcgccgggcagactttaatcggggtggtggcaatggtcgtggaggccgagggcgaggaggacccatgggccgtggaggctatggaggtggtggcagtggtggtggtggccgaggaggatttcccagtggaggtggtggcggtggaggacagcagcgagctggtgactggaagtgtcctaatcccacctgtgagaatatgaacttctcttggaggaatgaatgcaaccagtgtaaggcccctaaaccagatggcccaggagggggaccaggtggctctcacatggggggtaactacggggatgatcgtcgtggtggcagaggaggcgcgatcgcatatccctatgatgtgccggattatgctggagcaccaggaagtgctggttctgctgctggtagtggagcttctaactttactcagttcgttctcgtcgacaatggcggaactggcgacgtgactgtcgccccaagcaacttcgctaacgggatcgctgaatggatcagctctaactcgcgttcacaggcttacaaagtaacctgtagcgttcgtcagagctctgcgcagaatcgcaaatacaccatcaaagtcgaggtgcctaaaggcgcctggcgttcgtacttaaatatggaactaaccattccaattttcgccacgaattccgactgcgagcttattgttaaggcaatgcaaggtctcctaaaagatggaaacccgattccctcagcaatcgcagcaaactccggcatctacggcgccgattacaaggacgatgatgacaagggagcaccaggaagtgctggttctgctgctggtagtggagcgtgcccggtgccgctgcagctgccgccgctggaacgcctgaccctggatgataaaaaaccgctgaataccctgatctctgctactggtctgtggatgagtcgtaccggaaccattcataaaatcaaacaccacgaggttagccgttcgaaaatctatattgagatggcgtgtggcgatcatctggttgtgaacaatagccgctcttctcgtacagcacgtgcactgcgtcaccacaaatatcgtaaaacctgtaaacgttgccgtgtgtccgatgaggatctgaacaaattcctgacaaaagccaatgaggaccaaacaagcgtgaaagtgaaagtcgttagcgctcctacccgtactaaaaaagcaatgccgaaatccgttgctcgtgcccctaaaccactggaaaacactgaagcagcacaggcacagccgtctggaagcaaattctctccggccattcctgtttctacccaggagtccgtttctgttccagcaagtgtgagcaccagcattagcagtattagcaccggtgccaccgctagcgccctggttaaaggcaataccaatccgattacaagcatgtctgccccggttcaagcatcagctccagcactgacaaaatcccaaaccgatcgtctggaggttctgctgaatccgaaagacgaaatcagcctgaattccggcaaaccgtttcgtgaactggagagcgaactgctgtcacgtcgtaaaaaagacctgcaacaaatctatgccgaagaacgtgagaactatctggggaaactggaacgtgaaatcacccgctttttcgtggatcgtggctttctggagatcaaatccccgattctgattcctctggagtatatcgagcgtatgggcatcgacaatgataccgaactgagcaaacaaattttccgtgtggataaaaacttctgtctgcgccctatgctagcaccaaatctggctaactatctgcgcaaactggaccgtgccctgcctgatcctatcaaaatcttcgagatcggcccgtgttatcgtaaagagtccgacggtaaagaacatctggaggagtttaccatgctgaacttttgccaaatgggttcaggttgtactcgtgagaacctggaaagcatcatcaccgattttctgaaccacctgggcattgacttcaaaattgtgggcgacagctgtatggtgtttggcgacaccctggatgtcatgcacggcgacctggaactgtctagtgccgttgtgggcccaatcccgctggatcgtgagtggggtatcgacaaaccttggatcggtgcgggttttggtctggagcgtctgctgaaagtaaaacacgacttcaagaacatcaaacgtgctgcacgttccgagtcctattacaatggtatttctactaacctgtaa

SEQ ID NO: 666 - protein, 1182 aa, Artificial Sequence
  Description of Artificial Sequence: Synthetic polypeptide
  TOM20::FUS::MCP::PylRS(AF)
MVGRNSAIAAGVCGALFIGYCIYFDRKRRSDPNFKNRLRERRKKQKLAKERAGLSKLPDLKDAEAVQKFFMASNDYTQQATQSYGAYPTQPGQGYSQQSSQPYGQQSYSGYSQSTDTSGYGQSSYSSYGQSQNTGYGTQSTPQGYGSTGGYGSSQSSQSSYGQQSSYPGYGQQPAPSSTSGSYGSSSQSSSYGQPQSGSYSQQPSYGGQQQSYGQQQSYNPPQGYGQQNQYNSSSGGGGGGGGGGNYGQDQSSMSSGGGSGGGYGNQDQSGGGGSGGYGQQDRGGRGRGGSGGGGGGGGGGYNRSSGGYEPRGRGGGRGGRGGMGGSDRGGFNKFGGPRDQGSRHDSEQDNSDNNTIFVQGLGENVTIESVADYFKQIGIIKTNKKTGQPMINLYTDRETGKLKGEATVSFDDPPSAKAAIDWFDGKEFSGNPIKVSFATRRADFNRGGGNGRGGRGRGGPMGRGGYGGGGSGGGGRGGFPSGGGGGGGQQRAGDWKCPNPTCENMNFSWRNECNQCKAPKPDGPGGGPGGSHMGGNYGDDRRGGRGGAIAYPYDVPDYAGAPGSAGSAAGSGASNFTQFVLVDNGGTGDVTVAPSNFANGIAEWISSNSRSQAYKVTCSVRQSSAQNRKYTIKVEVPKGAWRSYLNMELTIPIFATNSDCELIVKAMQGLLKDGNPIPSAIAANSGIYGADYKDDDDKGAPGSAGSAAGSGACPVPLQLPPLERLTLDDKKPLNTLISATGLWMSRTGTIHKIKHHEVSRSKIYIEMACGDHLVVNNSRSSRTARALRHHKYRKTCKRCRVSDEDLNKFLTKANEDQTSVKVKVVSAPTRTKKAMPKSVARAPKPLENTEAAQAQPSGSKFSPAIPVSTQESVSVPASVSTSISSISTGATASALVKGNTNPITSMSAPVQASAPALTKSQTDRLEVLLNPKDEISLNSGKPFRELESELLSRRKKDLQQIYAEERENYLGKLEREITRFFVDRGFLEIKSPILIPLEYIERMGIDNDTELSKQIFRVDKNFCLRPMLAPNLANYLRKLDRALPDPIKIFEIGPCYRKESDGKEHLEEFTMLNFCQMGSGCTRENLESIITDFLNHLGIDFKIVGDSCMVFGDTLDVMHGDLELSSAVVGPIPLDREWGIDKPWIGAGFGLERLLKVKHDFKNIKRAARSESYYNGISTNL

SEQ ID NO: 667 - DNA, 3147 bp, Artificial Sequence
  Description of Artificial Sequence: Synthetic polynucleotide
  KIF16B::1xLAF-1::PylRS(AF)
atggcatcggtcaaggtggccgtgagggtccggcccatgaatcgcagggaaaaggacttggaggccaagttcattattcagatggagaaaagcaaaacgacaatcacaaacttaaagataccagaaggaggcactggggactcaggaagagaacggaccaagaccttcacctatgacttttctttttattctgctgatacaaaaagcccagattacgtttcacaagaaatggttttcaaaaccctcggcacagatgtcgtgaagtctgcatttgaaggttataatgcttgtgtctttgcatatgggcaaactggatctggaaagtcatacactatgatgggaaattctggagattctggcttaatacctcggatctgtgaaggactcttcagtcggataaatgaaaccaccagatgggatgaagcttcttttcgaactgaagtcagctacttagaaatttataacgaacgtgtgagagatctacttcggcggaagtcatctaaaaccttcaatttgagagtccgtgagcatcccaaagaaggcccttatgttgaggatttatccaaacatttagtacagaattatggtgacgtagaagaacttatggatgcgggcaatatcaaccggaccaccgcagcgactgggatgaacgacgtcagtagcaggtctcatgccatcttcaccatcaagttcactcaggctaaatttgattctgaaatgccatgtgaaaccgtcagtaagatccacttggttgatcttgccggaagtgagcgtgcagatgccaccggagccaccggggttaggctaaaggaagggggaaatattaacaagtccctcgtgactctggggaacgtcatttctgccttagctgatttatctcaggatgctgcaaatactcttgcaaagaagaagcaagttttcgtgccttacagggattctgtgttgacttggttgttaaaagatagccttggaggaaactctaaaactatcatgattgccaccatttcacctgctgatgtcaattatggagaaaccctaagtactcttcgctatgcaaatagagccaaaaacatcatcaacaagcctaccattaatgaggatgccaacgtcaaacttatccgtgagctgcgagctgaaatagccagactgaaaacgctgcttgctcaagggaatcagattgccctcttagactcccccacagactacaaggacgacgatgataagatggaaagcaaccagagcaacaacggcggctctggcaacgccgctctgaacagaggcggcagatacgtgcccccccacctgagaggaggcgacggcggcgccgccgccgctgcatctgccggcggagatgacagaagaggcggagccggaggcggcggctatagacggggaggcggaaacagcggcggcggaggcggaggcggctacgacagaggctacaacgacaaccgggacgaccgggacaacagaggcggcagcggcggatacggcagagatcgaaactacgaggacagaggctacaatggcggaggcggaggcggcggcaaccggggctacaacaacaacagaggaggcggcggcggcggctacaaccgccaggacagaggcgatggcggatctagcaatttcagcagaggcggctacaacaaccgggacgagggcagcgacaacagaggcagcggaagaagctacaacaatgaccggagagataatggcggagatggctccggagcgtgcccggtgccgctgcagctgccgccgctggaacgcctgaccctggatgataaaaaaccgctgaataccctgatctctgctactggtctgtggatgagtcgtaccggaaccattcataaaatcaaacaccacgaggttagccgttcgaaaatctatattgagatggcgtgtggcgatcatctggttgtgaacaatagccgctcttctcgtacagcacgtgcactgcgtcaccacaaatatcgtaaaacctgtaaacgttgccgtgtgtccgatgaggatctgaacaaattcctgacaaaagccaatgaggaccaaacaagcgtgaaagtgaaagtcgttagcgctcctacccgtactaaaaaagcaatgccgaaatccgttgctcgtgcccctaaaccactggaaaacactgaagcagcacaggcacagccgtctggaagcaaattctctccggccattcctgtttctacccaggagtccgtttctgttccagcaagtgtgagcaccagcattagcagtattagcaccggtgccaccgctagcgccctggttaaaggcaataccaatccgattacaagcatgtctgccccggttcaagcatcagctccagcactgacaaaatcccaaaccgatcgtctggaggttctgctgaatccgaaagacgaaatcagcctgaattccggcaaaccgtttcgtgaactggagagcgaactgctgtcacgtcgtaaaaaagacctgcaacaaatctatgccgaagaacgtgagaactatctggggaaactggaacgtgaaatcacccgctttttcgtggatcgtggctttctggagatcaaatccccgattctgattcctctggagtatatcgagcgtatgggcatcgacaatgataccgaactgagcaaacaaattttccgtgtggataaaaacttctgtctgcgccctatgctagcaccaaatctggctaactatctgcgcaaactggaccgtgccctgcctgatcctatcaaaatcttcgagatcggcccgtgttatcgtaaagagtccgacggtaaagaacatctggaggagtttaccatgctgaacttttgccaaatgggttcaggttgtactcgtgagaacctggaaagcatcatcaccgattttctgaaccacctgggcattgacttcaaaattgtgggcgacagctgtatggtgtttggcgacaccctggatgtcatgcacggcgacctggaactgtctagtgccgttgtgggcccaatcccgctggatcgtgagtggggtatcgacaaaccttggatcggtgcgggttttggtctggagcgtctgctgaaagtaaaacacgacttcaagaacatcaaacgtgctgcacgttccgagtcctattacaatggtatttctactaacctgtaa

SEQ ID NO: 668 - protein, 1048 aa, Artificial Sequence
  Description of Artificial Sequence: Synthetic polypeptide
  KIF16B::1xLAF-1::PylRS(AF)
MASVKVAVRVRPMNRREKDLEAKFIIQMEKSKTTITNLKIPEGGTGDSGRERTKTFTYDFSFYSADTKSPDYVSQEMVFKTLGTDVVKSAFEGYNACVFAYGQTGSGKSYTMMGNSGDSGLIPRICEGLFSRINETTRWDEASFRTEVSYLEIYNERVRDLLRRKSSKTFNLRVREHPKEGPYVEDLSKHLVQNYGDVEELMDAGNINRTTAATGMNDVSSRSHAIFTIKFTQAKFDSEMPCETVSKIHLVDLAGSERADATGATGVRLKEGGNINKSLVTLGNVISALADLSQDAANTLAKKKQVFVPYRDSVLTWLLKDSLGGNSKTIMIATISPADVNYGETLSTLRYANRAKNIINKPTINEDANVKLIRELRAEIARLKTLLAQGNQIALLDSPTDYKDDDDKMESNQSNNGGSGNAALNRGGRYVPPHLRGGDGGAAAAASAGGDDRRGGAGGGGYRRGGGNSGGGGGGGYDRGYNDNRDDRDNRGGSGGYGRDRNYEDRGYNGGGGGGGNRGYNNNRGGGGGGYNRQDRGDGGSSNFSRGGYNNRDEGSDNRGSGRSYNNDRRDNGGDGSGACPVPLQLPPLERLTLDDKKPLNTLISATGLWMSRTGTIHKIKHHEVSRSKIYIEMACGDHLVVNNSRSSRTARALRHHKYRKTCKRCRVSDEDLNKFLTKANEDQTSVKVKVVSAPTRTKKAMPKSVARAPKPLENTEAAQAQPSGSKFSPAIPVSTQESVSVPASVSTSISSISTGATASALVKGNTNPITSMSAPVQASAPALTKSQTDRLEVLLNPKDEISLNSGKPFRELESELLSRRKKDLQQIYAEERENYLGKLEREITRFFVDRGFLEIKSPILIPLEYIERMGIDNDTELSKQIFRVDKNFCLRPMLAPNLANYLRKLDRALPDPIKIFEIGPCYRKESDGKEHLEEFTMLNFCQMGSGCTRENLESIITDFLNHLGIDFKIVGDSCMVFGDTLDVMHGDLELSSAVVGPIPLDREWGIDKPWIGAGFGLERLLKVKHDFKNIKRAARSESYYNGISTNL

SEQ ID NO: 669 - DNA, 2151 bp, Artificial Sequence
  Description of Artificial Sequence: Synthetic polynucleotide
  KIF16B::1xLAF-1::MCP
atggcatcggtcaaggtggccgtgagggtccggcccatgaatcgcagggaaaaggacttggaggccaagttcattattcagatggagaaaagcaaaacgacaatcacaaacttaaagataccagaaggaggcactggggactcaggaagagaacggaccaagaccttcacctatgacttttctttttattctgctgatacaaaaagcccagattacgtttcacaagaaatggttttcaaaaccctcggcacagatgtcgtgaagtctgcatttgaaggttataatgcttgtgtctttgcatatgggcaaactggatctggaaagtcatacactatgatgggaaattctggagattctggcttaatacctcggatctgtgaaggactcttcagtcggataaatgaaaccaccagatgggatgaagcttcttttcgaactgaagtcagctacttagaaatttataacgaacgtgtgagagatctacttcggcggaagtcatctaaaaccttcaatttgagagtccgtgagcatcccaaagaaggcccttatgttgaggatttatccaaacatttagtacagaattatggtgacgtagaagaacttatggatgcgggcaatatcaaccggaccaccgcagcgactgggatgaacgacgtcagtagcaggtctcatgccatcttcaccatcaagttcactcaggctaaatttgattctgaaatgccatgtgaaaccgtcagtaagatccacttggttgatcttgccggaagtgagcgtgcagatgccaccggagccaccggggttaggctaaaggaagggggaaatattaacaagtccctcgtgactctggggaacgtcatttctgccttagctgatttatctcaggatgctgcaaatactcttgcaaagaagaagcaagttttcgtgccttacagggattctgtgttgacttggttgttaaaagatagccttggaggaaactctaaaactatcatgattgccaccatttcacctgctgatgtcaattatggagaaaccctaagtactcttcgctatgcaaatagagccaaaaacatcatcaacaagcctaccattaatgaggatgccaacgtcaaacttatccgtgagctgcgagctgaaatagccagactgaaaacgctgcttgctcaagggaatcagattgccctcttagactcccccacagactacaaggacgacgatgataagatggaaagcaaccagagcaacaacggcggctctggcaacgccgctctgaacagaggcggcagatacgtgcccccccacctgagaggaggcgacggcggcgccgccgccgctgcatctgccggcggagatgacagaagaggcggagccggaggcggcggctatagacggggaggcggaaacagcggcggcggaggcggaggcggctacgacagaggctacaacgacaaccgggacgaccgggacaacagaggcggcagcggcggatacggcagagatcgaaactacgaggacagaggctacaatggcggaggcggaggcggcggcaaccggggctacaacaacaacagaggaggcggcggcggcggctacaaccgccaggacagaggcgatggcggatctagcaatttcagcagaggcggctacaacaaccgggacgagggcagcgacaacagaggcagcggaagaagctacaacaatgaccggagagataatggcggagatggctccggatatccctatgatgtgccggattatgctggagcaccaggaagtgctggttctgctgctggtagtggagcttctaactttactcagttcgttctcgtcgacaatggcggaactggcgacgtgactgtcgccccaagcaacttcgctaacgggatcgctgaatggatcagctctaactcgcgttcacaggcttacaaagtaacctgtagcgttcgtcagagctctgcgcagaatcgcaaatacaccatcaaagtcgaggtgcctaaaggcgcctggcgttcgtacttaaatatggaactaaccattccaattttcgccacgaattccgactgcgagcttattgttaaggcaatgcaaggtctcctaaaagatggaaacccgattccctcagcaatcgcagcaaactccggcatctactaa

SEQ ID NO: 670 - protein, 716 aa, Artificial Sequence
  Description of Artificial Sequence: Synthetic polypeptide
  KIF16B::1xLAF-1::MCP
MASVKVAVRVRPMNRREKDLEAKFIIQMEKSKTTITNLKIPEGGTGDSGRERTKTFTYDFSFYSADTKSPDYVSQEMVFKTLGTDVVKSAFEGYNACVFAYGQTGSGKSYTMMGNSGDSGLIPRICEGLFSRINETTRWDEASFRTEVSYLEIYNERVRDLLRRKSSKTFNLRVREHPKEGPYVEDLSKHLVQNYGDVEELMDAGNINRTTAATGMNDVSSRSHAIFTIKFTQAKFDSEMPCETVSKIHLVDLAGSERADATGATGVRLKEGGNINKSLVTLGNVISALADLSQDAANTLAKKKQVFVPYRDSVLTWLLKDSLGGNSKTIMIATISPADVNYGETLSTLRYANRAKNIINKPTINEDANVKLIRELRAEIARLKTLLAQGNQIALLDSPTDYKDDDDKMESNQSNNGGSGNAALNRGGRYVPPHLRGGDGGAAAAASAGGDDRRGGAGGGGYRRGGGNSGGGGGGGYDRGYNDNRDDRDNRGGSGGYGRDRNYEDRGYNGGGGGGGNRGYNNNRGGGGGGYNRQDRGDGGSSNFSRGGYNNRDEGSDNRGSGRSYNNDRRDNGGDGSGYPYDVPDYAGAPGSAGSAAGSGASNFTQFVLVDNGGTGDVTVAPSNFANGIAEWISSNSRSQAYKVTCSVRQSSAQNRKYTIKVEVPKGAWRSYLNMELTIPIFATNSDCELIVKAMQGLLKDGNPIPSAIAANSGIY

SEQ ID NO: 671 - DNA, 2547 bp, Artificial Sequence
  Description of Artificial Sequence: Synthetic polynucleotide
  KIF16B::1xLAF-1::2xPCP
atggcatcggtcaaggtggccgtgagggtccggcccatgaatcgcagggaaaaggacttggaggccaagttcattattcagatggagaaaagcaaaacgacaatcacaaacttaaagataccagaaggaggcactggggactcaggaagagaacggaccaagaccttcacctatgacttttctttttattctgctgatacaaaaagcccagattacgtttcacaagaaatggttttcaaaaccctcggcacagatgtcgtgaagtctgcatttgaaggttataatgcttgtgtctttgcatatgggcaaactggatctggaaagtcatacactatgatgggaaattctggagattctggcttaatacctcggatctgtgaaggactcttcagtcggataaatgaaaccaccagatgggatgaagcttcttttcgaactgaagtcagctacttagaaatttataacgaacgtgtgagagatctacttcggcggaagtcatctaaaaccttcaatttgagagtccgtgagcatcccaaagaaggcccttatgttgaggatttatccaaacatttagtacagaattatggtgacgtagaagaacttatggatgcgggcaatatcaaccggaccaccgcagcgactgggatgaacgacgtcagtagcaggtctcatgccatcttcaccatcaagttcactcaggctaaatttgattctgaaatgccatgtgaaaccgtcagtaagatccacttggttgatcttgccggaagtgagcgtgcagatgccaccggagccaccggggttaggctaaaggaagggggaaatattaacaagtccctcgtgactctggggaacgtcatttctgccttagctgatttatctcaggatgctgcaaatactcttgcaaagaagaagcaagttttcgtgccttacagggattctgtgttgacttggttgttaaaagatagccttggaggaaactctaaaactatcatgattgccaccatttcacctgctgatgtcaattatggagaaaccctaagtactcttcgctatgcaaatagagccaaaaacatcatcaacaagcctaccattaatgaggatgccaacgtcaaacttatccgtgagctgcgagctgaaatagccagactgaaaacgctgcttgctcaagggaatcagattgccctcttagactcccccacagactacaaggacgacgatgataagatggaaagcaaccagagcaacaacggcggctctggcaacgccgctctgaacagaggcggcagatacgtgcccccccacctgagaggaggcgacggcggcgccgccgccgctgcatctgccggcggagatgacagaagaggcggagccggaggcggcggctatagacggggaggcggaaacagcggcggcggaggcggaggcggctacgacagaggctacaacgacaaccgggacgaccgggacaacagaggcggcagcggcggatacggcagagatcgaaactacgaggacagaggctacaatggcggaggcggaggcggcggcaaccggggctacaacaacaacagaggaggcggcggcggcggctacaaccgccaggacagaggcgatggcggatctagcaatttcagcagaggcggctacaacaaccgggacgagggcagcgacaacagaggcagcggaagaagctacaacaatgaccggagagataatggcggagatggctccggcgagcagaagctgatctcagaggaggacctgatcgaaggccgccatatgctagcctccaaaaccatcgttctttcggtcggcgaggctactcgcactctgactgagatccagtccaccgcagaccgtcagatcttcgaagagaaggtcgggcctctggtgggtcggctgcgcctcacggcttcgctccgtcaaaacggagccaagaccgcgtatcgcgtcaacctaaaactggatcaggcggacgtcgttgattccggacttccgaaagtgcgctacactcaggtatggtcgcacgacgtgacaatcgttgcgaatagcaccgaggcctcgcgcaaatcgttgtacgatttgaccaagtccctcgtcgcgacctcgcaggtcgaagatcttgtcgtcaaccttgtgccgctgggccgtgcggatccgctagcctccaaaaccatcgttctttcggtcggcgaggctactcgcactctgactgagatccagtccaccgcagaccgtcagatcttcgaagagaaggtcgggcctctggtgggtcggctgcgcctcacggcttcgctccgtcaaaacggagccaagaccgcgtatcgcgtcaacctaaaactggatcaggcggacgtcgttgattccggacttccgaaagtgcgctacactcaggtatggtcgcacgacgtgacaatcgttgcgaatagcaccgaggcctcgcgcaaatcgttgtacgatttgaccaagtccctcgtcgcgacctcgcaggtcgaagatcttgtcgtcaaccttgtgccgctgggccgtccaccggtcgccacctaa

SEQ ID NO: 672 - protein, 848 aa, Artificial Sequence
  Description of Artificial Sequence: Synthetic polypeptide
  KIF16B::1xLAF-1::2xPCP
MASVKVAVRVRPMNRREKDLEAKFIIQMEKSKTTITNLKIPEGGTGDSGRERTKTFTYDFSFYSADTKSPDYVSQEMVFKTLGTDVVKSAFEGYNACVFAYGQTGSGKSYTMMGNSGDSGLIPRICEGLFSRINETTRWDEASFRTEVSYLEIYNERVRDLLRRKSSKTFNLRVREHPKEGPYVEDLSKHLVQNYGDVEELMDAGNINRTTAATGMNDVSSRSHAIFTIKFTQAKFDSEMPCETVSKIHLVDLAGSERADATGATGVRLKEGGNINKSLVTLGNVISALADLSQDAANTLAKKKQVFVPYRDSVLTWLLKDSLGGNSKTIMIATISPADVNYGETLSTLRYANRAKNIINKPTINEDANVKLIRELRAEIARLKTLLAQGNQIALLDSPTDYKDDDDKMESNQSNNGGSGNAALNRGGRYVPPHLRGGDGGAAAAASAGGDDRRGGAGGGGYRRGGGNSGGGGGGGYDRGYNDNRDDRDNRGGSGGYGRDRNYEDRGYNGGGGGGGNRGYNNNRGGGGGGYNRQDRGDGGSSNFSRGGYNNRDEGSDNRGSGRSYNNDRRDNGGDGSGEQKLISEEDLIEGRHMLASKTIVLSVGEATRTLTEIQSTADRQIFEEKVGPLVGRLRLTASLRQNGAKTAYRVNLKLDQADVVDSGLPKVRYTQVWSHDVTIVANSTEASRKSLYDLTKSLVATSQVEDLVVNLVPLGRADPLASKTIVLSVGEATRTLTEIQSTADRQIFEEKVGPLVGRLRLTASLRQNGAKTAYRVNLKLDQADVVDSGLPKVRYTQVWSHDVTIVANSTEASRKSLYDLTKSLVATSQVEDLVVNLVPLGRPPVAT

SEQ ID NO: 673 - DNA, 3060 bp, Artificial Sequence
  Description of Artificial Sequence: Synthetic polynucleotide
  KIF16B::2xLAF-1::2xPCP
atggcatcggtcaaggtggccgtgagggtccggcccatgaatcgcagggaaaaggacttggaggccaagttcattattcagatggagaaaagcaaaacgacaatcacaaacttaaagataccagaaggaggcactggggactcaggaagagaacggaccaagaccttcacctatgacttttctttttattctgctgatacaaaaagcccagattacgtttcacaagaaatggttttcaaaaccctcggcacagatgtcgtgaagtctgcatttgaaggttataatgcttgtgtctttgcatatgggcaaactggatctggaaagtcatacactatgatgggaaattctggagattctggcttaatacctcggatctgtgaaggactcttcagtcggataaatgaaaccaccagatgggatgaagcttcttttcgaactgaagtcagctacttagaaatttataacgaacgtgtgagagatctacttcggcggaagtcatctaaaaccttcaatttgagagtccgtgagcatcccaaagaaggcccttatgttgaggatttatccaaacatttagtacagaattatggtgacgtagaagaacttatggatgcgggcaatatcaaccggaccaccgcagcgactgggatgaacgacgtcagtagcaggtctcatgccatcttcaccatcaagttcactcaggctaaatttgattctgaaatgccatgtgaaaccgtcagtaagatccacttggttgatcttgccggaagtgagcgtgcagatgccaccggagccaccggggttaggctaaaggaagggggaaatattaacaagtccctcgtgactctggggaacgtcatttctgccttagctgatttatctcaggatgctgcaaatactcttgcaaagaagaagcaagttttcgtgccttacagggattctgtgttgacttggttgttaaaagatagccttggaggaaactctaaaactatcatgattgccaccatttcacctgctgatgtcaattatggagaaaccctaagtactcttcgctatgcaaatagagccaaaaacatcatcaacaagcctaccattaatgaggatgccaacgtcaaacttatccgtgagctgcgagctgaaatagccagactgaaaacgctgcttgctcaagggaatcagattgccctcttagactcccccacagactacaaggacgacgatgataagatggaaagcaaccagagcaacaacggcggctctggcaacgccgctctgaacagaggcggcagatacgtgcccccccacctgagaggaggcgacggcggcgccgccgccgctgcatctgccggcggagatgacagaagaggcggagccggaggcggcggctatagacggggaggcggaaacagcggcggcggaggcggaggcggctacgacagaggctacaacgacaaccgggacgaccgggacaacagaggcggcagcggcggatacggcagagatcgaaactacgaggacagaggctacaatggcggaggcggaggcggcggcaaccggggctacaacaacaacagaggaggcggcggcggcggctacaaccgccaggacagaggcgatggcggatctagcaatttcagcagaggcggctacaacaaccgggacgagggcagcgacaacagaggcagcggaagaagctacaacaatgaccggagagataatggcggagatggctccggcggaatggaaagcaaccagagcaacaacggcggctctggcaacgccgctctgaacagaggcggcagatacgtgcccccccacctgagaggaggcgacggcggcgccgccgccgctgcatctgccggcggagatgacagaagaggcggagccggaggcggcggctatagacggggaggcggaaacagcggcggcggaggcggaggcggctacgacagaggctacaacgacaaccgggacgaccgggacaacagaggcggcagcggcggatacggcagagatcgaaactacgaggacagaggctacaatggcggaggcggaggcggcggcaaccggggctacaacaacaacagaggaggcggcggcggcggctacaaccgccaggacagaggcgatggcggatctagcaatttcagcagaggcggctacaacaaccgggacgagggcagcgacaacagaggcagcggaagaagctacaacaatgaccggagagataatggcggagatggctccggcgagcagaagctgatctcagaggaggacctgatcgaaggccgccatatgctagcctccaaaaccatcgttctttcggtcggcgaggctactcgcactctgactgagatccagtccaccgcagaccgtcagatcttcgaagagaaggtcgggcctctggtgggtcggctgcgcctcacggcttcgctccgtcaaaacggagccaagaccgcgtatcgcgtcaacctaaaactggatcaggcggacgtcgttgattccggacttccgaaagtgcgctacactcaggtatggtcgcacgacgtgacaatcgttgcgaatagcaccgaggcctcgcgcaaatcgttgtacgatttgaccaagtccctcgtcgcgacctcgcaggtcgaagatcttgtcgtcaaccttgtgccgctgggccgtgcggatccgctagcctccaaaaccatcgttctttcggtcggcgaggctactcgcactctgactgagatccagtccaccgcagaccgtcagatcttcgaagagaaggtcgggcctctggtgggtcggctgcgcctcacggcttcgctccgtcaaaacggagccaagaccgcgtatcgcgtcaacctaaaactggatcaggcggacgtcgttgattccggacttccgaaagtgcgctacactcaggtatggtcgcacgacgtgacaatcgttgcgaatagcaccgaggcctcgcgcaaatcgttgtacgatttgaccaagtccctcgtcgcgacctcgcaggtcgaagatcttgtcgtcaaccttgtgccgctgggccgtccaccggtcgccacctaa

SEQ ID NO: 674 - protein, 1019 aa, Artificial Sequence
  Description of Artificial Sequence: Synthetic polypeptide
  KIF16B::2xLAF-1::2xPCP
MASVKVAVRVRPMNRREKDLEAKFIIQMEKSKTTITNLKIPEGGTGDSGRERTKTFTYDFSFYSADTKSPDYVSQEMVFKTLGTDVVKSAFEGYNACVFAYGQTGSGKSYTMMGNSGDSGLIPRICEGLFSRINETTRWDEASFRTEVSYLEIYNERVRDLLRRKSSKTFNLRVREHPKEGPYVEDLSKHLVQNYGDVEELMDAGNINRTTAATGMNDVSSRSHAIFTIKFTQAKFDSEMPCETVSKIHLVDLAGSERADATGATGVRLKEGGNINKSLVTLGNVISALADLSQDAANTLAKKKQVFVPYRDSVLTWLLKDSLGGNSKTIMIATISPADVNYGETLSTLRYANRAKNIINKPTINEDANVKLIRELRAEIARLKTLLAQGNQIALLDSPTDYKDDDDKMESNQSNNGGSGNAALNRGGRYVPPHLRGGDGGAAAAASAGGDDRRGGAGGGGYRRGGGNSGGGGGGGYDRGYNDNRDDRDNRGGSGGYGRDRNYEDRGYNGGGGGGGNRGYNNNRGGGGGGYNRQDRGDGGSSNFSRGGYNNRDEGSDNRGSGRSYNNDRRDNGGDGSGGMESNQSNNGGSGNAALNRGGRYVPPHLRGGDGGAAAAASAGGDDRRGGAGGGGYRRGGGNSGGGGGGGYDRGYNDNRDDRDNRGGSGGYGRDRNYEDRGYNGGGGGGGNRGYNNNRGGGGGGYNRQDRGDGGSSNFSRGGYNNRDEGSDNRGSGRSYNNDRRDNGGDGSGEQKLISEEDLIEGRHMLASKTIVLSVGEATRTLTEIQSTADRQIFEEKVGPLVGRLRLTASLRQNGAKTAYRVNLKLDQADVVDSGLPKVRYTQVWSHDVTIVANSTEASRKSLYDLTKSLVATSQVEDLVVNLVPLGRADPLASKTIVLSVGEATRTLTEIQSTADRQIFEEKVGPLVGRLRLTASLRQNGAKTAYRVNLKLDQADVVDSGLPKVRYTQVWSHDVTIVANSTEASRKSLYDLTKSLVATSQVEDLVVNLVPLGRPPVAT

SEQ ID NO: 675 - DNA, 3660 bp, Artificial Sequence
  Description of Artificial Sequence: Synthetic polynucleotide
  KIF16B::2xLAF-1::PylRS(AF)
atggcatcggtcaaggtggccgtgagggtccggcccatgaatcgcagggaaaaggacttggaggccaagttcattattcagatggagaaaagcaaaacgacaatcacaaacttaaagataccagaaggaggcactggggactcaggaagagaacggaccaagaccttcacctatgacttttctttttattctgctgatacaaaaagcccagattacgtttcacaagaaatggttttcaaaaccctcggcacagatgtcgtgaagtctgcatttgaaggttataatgcttgtgtctttgcatatgggcaaactggatctggaaagtcatacactatgatgggaaattctggagattctggcttaatacctcggatctgtgaaggactcttcagtcggataaatgaaaccaccagatgggatgaagcttcttttcgaactgaagtcagctacttagaaatttataacgaacgtgtgagagatctacttcggcggaagtcatctaaaaccttcaatttgagagtccgtgagcatcccaaagaaggcccttatgttgaggatttatccaaacatttagtacagaattatggtgacgtagaagaacttatggatgcgggcaatatcaaccggaccaccgcagcgactgggatgaacgacgtcagtagcaggtctcatgccatcttcaccatcaagttcactcaggctaaatttgattctgaaatgccatgtgaaaccgtcagtaagatccacttggttgatcttgccggaagtgagcgtgcagatgccaccggagccaccggggttaggctaaaggaagggggaaatattaacaagtccctcgtgactctggggaacgtcatttctgccttagctgatttatctcaggatgctgcaaatactcttgcaaagaagaagcaagttttcgtgccttacagggattctgtgttgacttggttgttaaaagatagccttggaggaaactctaaaactatcatgattgccaccatttcacctgctgatgtcaattatggagaaaccctaagtactcttcgctatgcaaatagagccaaaaacatcatcaacaagcctaccattaatgaggatgccaacgtcaaacttatccgtgagctgcgagctgaaatagccagactgaaaacgctgcttgctcaagggaatcagattgccctcttagactcccccacagactacaaggacgacgatgataagatggaaagcaaccagagcaacaacggcggctctggcaacgccgctctgaacagaggcggcagatacgtgcccccccacctgagaggaggcgacggcggcgccgccgccgctgcatctgccggcggagatgacagaagaggcggagccggaggcggcggctatagacggggaggcggaaacagcggcggcggaggcggaggcggctacgacagaggctacaacgacaaccgggacgaccgggacaacagaggcggcagcggcggatacggcagagatcgaaactacgaggacagaggctacaatggcggaggcggaggcggcggcaaccggggctacaacaacaacagaggaggcggcggcggcggctacaaccgccaggacagaggcgatggcggatctagcaatttcagcagaggcggctacaacaaccgggacgagggcagcgacaacagaggcagcggaagaagctacaacaatgaccggagagataatggcggagatggctccggcggaatggaaagcaaccagagcaacaacggcggctctggcaacgccgctctgaacagaggcggcagatacgtgcccccccacctgagaggaggcgacggcggcgccgccgccgctgcatctgccggcggagatgacagaagaggcggagccggaggcggcggctatagacggggaggcggaaacagcggcggcggaggcggaggcggctacgacagaggctacaacgacaaccgggacgaccgggacaacagaggcggcagcggcggatacggcagagatcgaaactacgaggacagaggctacaatggcggaggcggaggcggcggcaaccggggctacaacaacaacagaggaggcggcggcggcggctacaaccgccaggacagaggcgatggcggatctagcaatttcagcagaggcggctacaacaaccgggacgagggcagcgacaacagaggcagcggaagaagctacaacaatgaccggagagataatggcggagatggctccggagcgtgcccggtgccgctgcagctgccgccgctggaacgcctgaccctggatgataaaaaaccgctgaataccctgatctctgctactggtctgtggatgagtcgtaccggaaccattcataaaatcaaacaccacgaggttagccgttcgaaaatctatattgagatggcgtgtggcgatcatctggttgtgaacaatagccgctcttctcgtacagcacgtgcactgcgtcaccacaaatatcgtaaaacctgtaaacgttgccgtgtgtccgatgaggatctgaacaaattcctgacaaaagccaatgaggaccaaacaagcgtgaaagtgaaagtcgttagcgctcctacccgtactaaaaaagcaatgccgaaatccgttgctcgtgcccctaaaccactggaaaacactgaagcagcacaggcacagccgtctggaagcaaattctctccggccattcctgtttctacccaggagtccgtttctgttccagcaagtgtgagcaccagcattagcagtattagcaccggtgccaccgctagcgccctggttaaaggcaataccaatccgattacaagcatgtctgccccggttcaagcatcagctccagcactgacaaaatcccaaaccgatcgtctggaggttctgctgaatccgaaagacgaaatcagcctgaattccggcaaaccgtttcgtgaactggagagcgaactgctgtcacgtcgtaaaaaagacctgcaacaaatctatgccgaagaacgtgagaactatctggggaaactggaacgtgaaatcacccgctttttcgtggatcgtggctttctggagatcaaatccccgattctgattcctctggagtatatcgagcgtatgggcatcgacaatgataccgaactgagcaaacaaattttccgtgtggataaaaacttctgtctgcgccctatgctagcaccaaatctggctaactatctgcgcaaactggaccgtgccctgcctgatcctatcaaaatcttcgagatcggcccgtgttatcgtaaagagtccgacggtaaagaacatctggaggagtttaccatgctgaacttttgccaaatgggttcaggttgtactcgtgagaacctggaaagcatcatcaccgattttctgaaccacctgggcattgacttcaaaattgtgggcgacagctgtatggtgtttggcgacaccctggatgtcatgcacggcgacctggaactgtctagtgccgttgtgggcccaatcccgctggatcgtgagtggggtatcgacaaaccttggatcggtgcgggttttggtctggagcgtctgctgaaagtaaaacacgacttcaagaacatcaaacgtgctgcacgttccgagtcctattacaatggtatttctactaacctgtaa

SEQ ID NO: 676 - protein, 1219 aa, Artificial Sequence
  Description of Artificial Sequence: Synthetic polypeptide
  KIF16B::2xLAF-1::PylRS(AF)
MASVKVAVRVRPMNRREKDLEAKFIIQMEKSKTTITNLKIPEGGTGDSGRERTKTFTYDFSFYSADTKSPDYVSQEMVFKTLGTDVVKSAFEGYNACVFAYGQTGSGKSYTMMGNSGDSGLIPRICEGLFSRINETTRWDEASFRTEVSYLEIYNERVRDLLRRKSSKTFNLRVREHPKEGPYVEDLSKHLVQNYGDVEELMDAGNINRTTAATGMNDVSSRSHAIFTIKFTQAKFDSEMPCETVSKIHLVDLAGSERADATGATGVRLKEGGNINKSLVTLGNVISALADLSQDAANTLAKKKQVFVPYRDSVLTWLLKDSLGGNSKTIMIATISPADVNYGETLSTLRYANRAKNIINKPTINEDANVKLIRELRAEIARLKTLLAQGNQIALLDSPTDYKDDDDKMESNQSNNGGSGNAALNRGGRYVPPHLRGGDGGAAAAASAGGDDRRGGAGGGGYRRGGGNSGGGGGGGYDRGYNDNRDDRDNRGGSGGYGRDRNYEDRGYNGGGGGGGNRGYNNNRGGGGGGYNRQDRGDGGSSNFSRGGYNNRDEGSDNRGSGRSYNNDRRDNGGDGSGGMESNQSNNGGSGNAALNRGGRYVPPHLRGGDGGAAAAASAGGDDRRGGAGGGGYRRGGGNSGGGGGGGYDRGYNDNRDDRDNRGGSGGYGRDRNYEDRGYNGGGGGGGNRGYNNNRGGGGGGYNRQDRGDGGSSNFSRGGYNNRDEGSDNRGSGRSYNNDRRDNGGDGSGACPVPLQLPPLERLTLDDKKPLNTLISATGLWMSRTGTIHKIKHHEVSRSKIYIEMACGDHLVVNNSRSSRTARALRHHKYRKTCKRCRVSDEDLNKFLTKANEDQTSVKVKVVSAPTRTKKAMPKSVARAPKPLENTEAAQAQPSGSKFSPAIPVSTQESVSVPASVSTSISSISTGATASALVKGNTNPITSMSAPVQASAPALTKSQTDRLEVLLNPKDEISLNSGKPFRELESELLSRRKKDLQQIYAEERENYLGKLEREITRFFVDRGFLEIKSPILIPLEYIERMGIDNDTELSKQIFRVDKNFCLRPMLAPNLANYLRKLDRALPDPIKIFEIGPCYRKESDGKEHLEEFTMLNFCQMGSGCTRENLESIITDFLNHLGIDFKIVGDSCMVFGDTLDVMHGDLELSSAVVGPIPLDREWGIDKPWIGAGFGLERLLKVKHDFKNIKRAARSESYYNGISTNL

SEQ ID NO: 677 - DNA, 2664 bp, Artificial Sequence
  Description of Artificial Sequence: Synthetic polynucleotide
  KIF16B::2xLAF-1::MCP
atggcatcggtcaaggtggccgtgagggtccggcccatgaatcgcagggaaaaggacttggaggccaagttcattattcagatggagaaaagcaaaacgacaatcacaaacttaaagataccagaaggaggcactggggactcaggaagagaacggaccaagaccttcacctatgacttttctttttattctgctgatacaaaaagcccagattacgtttcacaagaaatggttttcaaaaccctcggcacagatgtcgtgaagtctgcatttgaaggttataatgcttgtgtctttgcatatgggcaaactggatctggaaagtcatacactatgatgggaaattctggagattctggcttaatacctcggatctgtgaaggactcttcagtcggataaatgaaaccaccagatgggatgaagcttcttttcgaactgaagtcagctacttagaaatttataacgaacgtgtgagagatctacttcggcggaagtcatctaaaaccttcaatttgagagtccgtgagcatcccaaagaaggcccttatgttgaggatttatccaaacatttagtacagaattatggtgacgtagaagaacttatggatgcgggcaatatcaaccggaccaccgcagcgactgggatgaacgacgtcagtagcaggtctcatgccatcttcaccatcaagttcactcaggctaaatttgattctgaaatgccatgtgaaaccgtcagtaagatccacttggttgatcttgccggaagtgagcgtgcagatgccaccggagccaccggggttaggctaaaggaagggggaaatattaacaagtccctcgtgactctggggaacgtcatttctgccttagctgatttatctcaggatgctgcaaatactcttgcaaagaagaagcaagttttcgtgccttacagggattctgtgttgacttggttgttaaaagatagccttggaggaaactctaaaactatcatgattgccaccatttcacctgctgatgtcaattatggagaaaccctaagtactcttcgctatgcaaatagagccaaaaacatcatcaacaagcctaccattaatgaggatgccaacgtcaaacttatccgtgagctgcgagctgaaatagccagactgaaaacgctgcttgctcaagggaatcagattgccctcttagactcccccacagactacaaggacgacgatgataagatggaaagcaaccagagcaacaacggcggctctggcaacgccgctctgaacagaggcggcagatacgtgcccccccacctgagaggaggcgacggcggcgccgccgccgctgcatctgccggcggagatgacagaagaggcggagccggaggcggcggctatagacggggaggcggaaacagcggcggcggaggcggaggcggctacgacagaggctacaacgacaaccgggacgaccgggacaacagaggcggcagcggcggatacggcagagatcgaaactacgaggacagaggctacaatggcggaggcggaggcggcggcaaccggggctacaacaacaacagaggaggcggcggcggcggctacaaccgccaggacagaggcgatggcggatctagcaatttcagcagaggcggctacaacaaccgggacgagggcagcgacaacagaggcagcggaagaagctacaacaatgaccggagagataatggcggagatggctccggcggaatggaaagcaaccagagcaacaacggcggctctggcaacgccgctctgaacagaggcggcagatacgtgcccccccacctgagaggaggcgacggcggcgccgccgccgctgcatctgccggcggagatgacagaagaggcggagccggaggcggcggctatagacggggaggcggaaacagcggcggcggaggcggaggcggctacgacagaggctacaacgacaaccgggacgaccgggacaacagaggcggcagcggcggatacggcagagatcgaaactacgaggacagaggctacaatggcggaggcggaggcggcggcaaccggggctacaacaacaacagaggaggcggcggcggcggctacaaccgccaggacagaggcgatggcggatctagcaatttcagcagaggcggctacaacaaccgggacgagggcagcgacaacagaggcagcggaagaagctacaacaatgaccggagagataatggcggagatggctccggatatccctatgatgtgccggattatgctggagcaccaggaagtgctggttctgctgctggtagtggagcttctaactttactcagttcgttctcgtcgacaatggcggaactggcgacgtgactgtcgccccaagcaacttcgctaacgggatcgctgaatggatcagctctaactcgcgttcacaggcttacaaagtaacctgtagcgttcgtcagagctctgcgcagaatcgcaaatacaccatcaaagtcgaggtgcctaaaggcgcctggcgttcgtacttaaatatggaactaaccattccaattttcgccacgaattccgactgcgagcttattgttaaggcaatgcaaggtctcctaaaagatggaaacccgattccctcagcaatcgcagcaaactccggcatctactaa

SEQ ID NO: 678 - protein, 887 aa, Artificial Sequence
  Description of Artificial Sequence: Synthetic polypeptide
  KIF16B::2xLAF-1::MCP
MASVKVAVRVRPMNRREKDLEAKFIIQMEKSKTTITNLKIPEGGTGDSGRERTKTFTYDFSFYSADTKSPDYVSQEMVFKTLGTDVVKSAFEGYNACVFAYGQTGSGKSYTMMGNSGDSGLIPRICEGLFSRINETTRWDEASFRTEVSYLEIYNERVRDLLRRKSSKTFNLRVREHPKEGPYVEDLSKHLVQNYGDVEELMDAGNINRTTAATGMNDVSSRSHAIFTIKFTQAKFDSEMPCETVSKIHLVDLAGSERADATGATGVRLKEGGNINKSLVTLGNVISALADLSQDAANTLAKKKQVFVPYRDSVLTWLLKDSLGGNSKTIMIATISPADVNYGETLSTLRYANRAKNIINKPTINEDANVKLIRELRAEIARLKTLLAQGNQIALLDSPTDYKDDDDKMESNQSNNGGSGNAALNRGGRYVPPHLRGGDGGAAAAASAGGDDRRGGAGGGGYRRGGGNSGGGGGGGYDRGYNDNRDDRDNRGGSGGYGRDRNYEDRGYNGGGGGGGNRGYNNNRGGGGGGYNRQDRGDGGSSNFSRGGYNNRDEGSDNRGSGRSYNNDRRDNGGDGSGGMESNQSNNGGSGNAALNRGGRYVPPHLRGGDGGAAAAASAGGDDRRGGAGGGGYRRGGGNSGGGGGGGYDRGYNDNRDDRDNRGGSGGYGRDRNYEDRGYNGGGGGGGNRGYNNNRGGGGGGYNRQDRGDGGSSNFSRGGYNNRDEGSDNRGSGRSYNNDRRDNGGDGSGYPYDVPDYAGAPGSAGSAAGSGASNFTQFVLVDNGGTGDVTVAPSNFANGIAEWISSNSRSQAYKVTCSVRQSSAQNRKYTIKVEVPKGAWRSYLNMELTIPIFATNSDCELIVKAMQGLLKDGNPIPSAIAANSGIY

SEQ ID NO: 679 - DNA, 33 bp, Artificial Sequence
  Description of Artificial Sequence: Synthetic oligonucleotide
  VSV-G
tatacagatattgaaatgaacagattgggaaag

SEQ ID NO: 680 - protein, 11 aa, Artificial Sequence
  Description of Artificial Sequence: Synthetic peptide
  VSV-G
YTDIEMNRLGK

SEQ ID NO: 681 - DNA, 27 bp, Artificial Sequence
  Description of Artificial Sequence: Synthetic oligonucleotide
  HA
tacccctacgacgtgcccgactacgcc

SEQ ID NO: 682 - protein, 9 aa, Artificial Sequence
  Description of Artificial Sequence: Synthetic peptide
  HA
YPYDVPDYA

SEQ ID NO: 683 - DNA, 30 bp, Artificial Sequence
  Description of Artificial Sequence: Synthetic oligonucleotide
  Myc
gagcagaagctgatctcagaggaggacctg

SEQ ID NO: 684 - protein, 10 aa, Artificial Sequence
  Description of Artificial Sequence: Synthetic peptide
  Myc
EQKLISEEDL

SEQ ID NO: 685 - protein, 6 aa, Artificial Sequence
  Description of Artificial Sequence: Synthetic 6xHis tag
HHHHHH
